(19) United States
(12) Patent Application Publication
(10) Pub. No.: US 2019/0211349 A1
(43) Pub. Date: Jul. 11, 2019

(54) BLACK-SPOT RESISTANT POTATOES WITH REDUCED TUBER-SPECIFIC POLYPHENOL OXIDASE ACTIVITY

(71) Applicant: CELLECTIS, Paris (FR)

(72) Inventors: Benjamin Clasen, South St. Paul, MN (US); Song Luo, Chicago, IL (US); Daniel F. Voytas, Falcon Heights, MN (US); Feng Zhang, Maple Grove, MN (US)

(21) Appl. No.: 16/326,549

(22) PCT Filed: Aug. 18, 2017
(86) PCT No.: PCT/US2017/047604

§ 371 Date: Feb. 19, 2019

Related U.S. Application Data
(60) Provisional application No. 62/489,632, filed on Apr. 25, 2017.
(60) Provisional application No. 62/376,597, filed on Aug. 18, 2016.

(51) Int. Cl. C12N 15/82; C12N 15/52

(52) U.S. Cl. CPC C12N 15/8261; C12N 9/0059; C12N 15/52

(57) ABSTRACT

Materials and methods are provided for making plants (e.g., Solanum varieties) with resistance to black-spot bruising, specifically, by making TALE-nuclease-induced mutations in genes encoding tuber specific expressed polyphenol oxidase.

### CROSS-REFERENCE TO RELATED APPLICATIONS

[0001] This application claims benefit of priority from U.S. Provisional Application No. 62/376,597, filed Aug. 18, 2016, and U.S. Provisional Application No. 62/489,632, filed on Apr. 25, 2017, both of which are incorporated herein by reference in their entirety.

### TECHNICAL FIELD

[0002] This document provides materials and methods for creating potato varieties with reduced polyphenol oxidase activity.

### BACKGROUND

[0003] Black-spot bruise is a serious problem for the potato industry, resulting in major losses to commercial potato processors that produce chips and French fries. Black-spot bruise occurs upon physical impact or following damage (e.g., mechanical damage) to tubers, which initiates enzymatic browning. Symptoms of black-spot bruise include production of black, brown, and red pigments in the potatoes.

### SUMMARY

[0004] Bruise resistance is a trait important to growers and processors alike, as reduced bruise damage can minimize crop rejection and waste in processing due to discarding of blackened fries and chips. This document provides materials and methods for creating potato varieties that have increased bruise resistance due to reduced expression of tuber-specific polyphenol oxidase (PPO), which converts monophenols to o-diphenols, and o-dihydroxyphenols to o-quinones. The potato varieties described herein can be produced without the use of transgenesis. Potato varieties having mutations in genes encoding PPO also are provided.

[0005] This document is based at least in part on the discovery that potatoes with reduced tuber-specific PPO can be obtained using a sequence-specific nuclease to make a targeted mutation or knockout in tuber-specific PPO genes, specifically POT32 and POT33. The modified potatoes have increased resistance to black-spot bruising, and their use can result in reduced levels of crop rejection and waste as compared to non-modified potatoes. Further, the potatoes do not carry any foreign DNA and therefore may be considered by regulatory agencies as non-GM. This document also is based at least in part on the development of potato cultivars with loss-of-function PPO mutations generated by sequence-specific nucleases.

[0006] In one aspect, this document features a Solanum plant, plant part, or plant cell containing a mutation in at least one polyphenol oxidase (PPO) allele endogenous to the plant, plant part, or plant cell, such that the plant, plant part, or plant cell has reduced expression of PPO as compared to a control Solanum plant, plant part, or plant cell that lacks the mutation. Each mutation can be a deletion of more than one nucleotide base pair. Each mutation can be at a target sequence as set forth in SEQ ID NO:2340 or 2341, at a target sequence having at least 95 percent identity to SEQ ID NO:2340 or 2341, at a target sequence as set forth in SEQ ID NO:2342 or 2343, or at a target sequence having at least 95 percent identity to SEQ ID NO:2342 or 2343. The mutation can have been made using a rare-cutting endonuclease. The rare-cutting endonuclease can be a transcription activator-like effector endonuclease (TALE-nuclease). The TALE-nuclease can bind to a sequence as set forth in any of SEQ ID NOS:3-14 or 2346-2363. The at least one PPO allele can exhibit removal of an endogenous nucleic acid and does not include any exogenous nucleic acid. The at least one PPO allele can be a POT32 allele or a POT33 allele. The at least one PPO allele can be one or more POT32 alleles, where the one or more POT32 alleles contain one or more sequences selected from the group consisting of SEQ ID NO:2332, SEQ ID NO:2333, and SEQ ID NO:2334, or one or more sequences selected from the group consisting of SEQ ID NO:2336, SEQ ID NO:2337, SEQ ID NO:2338, and SEQ ID NO:2339. Every endogenous allele of POT32 can be mutated, every endogenous allele of POT33 can be mutated, or every endogenous allele of both POT32 and POT33 can be mutated. Each POT32 allele, each POT33 allele, or each POT32 and POT33 allele can exhibit removal of an endogenous nucleic acid and does not include any exogenous nucleic acid. The plant, plant part, or plant cell may have no detectable expression of PPO. The Solanum plant, plant part, or plant cell can be a Solanum tuberosum plant, plant part, or plant cell. The plant, plant part, or plant cell can have decreased levels of quinones as compared to a control plant, plant part, or plant cell that lacks the mutation.

[0007] In another aspect, this document features a method for making a Solanum plant that has reduced expression of PPO. The method can include (a) contacting a population of Solanum plant cells containing at least one functional endogenous PPO allele with one or more rare-cutting endonucleases targeted to the at least one PPO allele, (b) selecting, from the population, a cell in which the at least one PPO allele has been mutated, and (c) growing the selected plant cell into a Solanum plant, where the Solanum plant has reduced expression of PPO as compared to a control Solanum plant in which the at least one PPO allele has not been mutated. The Solanum plant cells can be protoplasts. The method can include transforming the protoplasts with a nucleic acid encoding the rare-cutting endonuclease. The nucleic acid can be an mRNA. The nucleic acid can be contained within a vector. The method can include introducing into the protoplasts a rare-cutting endonuclease protein (e.g., a TALE-nuclease). The TALE-nuclease can be targeted to a sequence as set forth in SEQ ID NO: 2340 or 2341, or to a sequence having at least 95 percent identity to the sequence set forth in SEQ ID NO: 2340 or 2341. The TALE-nuclease can be targeted to a sequence as set forth in SEQ ID NO: 2342 or 2343, or to a sequence having at least 95 percent identity to the sequence set forth in SEQ ID NO: 2342 or 2343. The TALE-nuclease can bind to a sequence as set forth in any of SEQ ID NOS:3-14 or 2346-2363. The at least one PPO allele can be a POT32 allele or a POT33 allele. The at least one PPO allele can be one or more POT32 alleles, and the one or more POT32 alleles can contain one or more sequences selected from the group consisting of SEQ ID NO:2332, SEQ ID NO:2333, and SEQ ID NO:2334, or one or more sequences selected from the group consisting of SEQ ID NO:2336, SEQ ID NO:2337, SEQ ID NO:2338, and SEQ ID NO:2339. The Solanum plant cells can be protoplasts. The method can further include culturing the protoplasts to generate plant lines, and/or isolating genomic DNA comprising at least a portion of the PPO locus from the protoplasts. The Solanum plant cells can be S. tuberosum plant cells.

[0008] In another aspect, this document features a method for producing a bruising resistant potato product. The method can include (a) providing a Solanum plant or plant part that contains a mutation in at least one PPO allele endogenous to the plant or plant part, such that the plant, plant part, or plant cell has reduced expression of PPO as compared to a control Solanum plant or plant part that lacks the mutation; and (b) producing a bruising resistant potato product from the plant or plant part. The mutation can be at a target sequence as set forth in SEQ ID NO: 2340 or 2341, at a target sequence having at least 95 percent identity to SEQ ID NO: 2340 or 2341, at a target sequence as set forth in SEQ ID NO: 2342 or 2343, or at a target sequence having at least 95 percent identity to SEQ ID NO: 2342 or 2343. The mutation can have been made using a rare-cutting endonuclease (e.g., a TALE-nuclease). The TALE-nuclease can bind to a sequence as set forth in any of SEQ ID NOS: 3-14 or 2346-2363. The at least one PPO allele can be a POT32 allele or a POT33 allele. The at least one PPO allele can be one or more POT32 alleles, where the one or more POT32 alleles contain one or more sequences selected from the group consisting of SEQ ID NO:2332, SEQ ID NO:2333, and SEQ ID NO:2334, or one or more sequences selected from the group consisting of SEQ ID NO:2336, SEQ ID NO:2337, SEQ ID NO:2338, and SEQ ID NO:2339. The Solanum plant or plant part can be a S. tuberosum plant or plant part. The Solanum plant or plant part may have no detectable expression of PPO.

[0009] This document also features a bruising resistant tuber generated from a Solanum plant or plant part that contains a mutation in at least one PPO allele, such that the bruising resistant tuber has reduced expression of PPO as compared to a control Solanum plant, plant part, or plant cell that lacks the mutation. Each mutation can be a deletion of more than one nucleotide base pair. Each mutation can be at a target sequence as set forth in SEQ ID NO: 2340 or 2341, at a target sequence having at least 95 percent identity to SEQ ID NO: 2340 or 2341, at a target sequence as set forth in SEQ ID NO: 2342 or 2343, or at a target sequence having at least 95 percent identity to SEQ ID NO: 2342 or 2343. Each mutation can have been made using a rare-cutting endonuclease (e.g., a TALE-nuclease). The TALE-nuclease can bind to a sequence as set forth in any of SEQ ID NOS:3-14 or 2346-2363. The tuber can have decreased levels of quinones as compared to tubers generated from a control plant or plant part that lacks the mutation. The Solanum plant or plant part can be a S. tuberosum plant or plant part. The at least one PPO allele can be a POT32 allele or a POT33 allele. The at least one PPO allele can be one or more POT32 alleles, wherein the one or more POT32 alleles contain one or more sequences selected from the group consisting of SEQ ID NO:2332, SEQ ID NO:2333, and SEQ ID NO:2334, or one or more sequences selected from the group consisting of SEQ ID NO:2336, SEQ ID NO:2337, SEQ ID NO:2338, and SEQ ID NO:2339.

[0010] In yet another aspect, this document features a food product produced from the bruising resistant tuber provided herein. The food product can have been cooked. The food product can be a French fry, chip, crisp, potato, dehydrated potato or baked potato.

[0011] Unless otherwise defined, all technical and scientific terms used herein have the same meaning as commonly understood by one of ordinary skill in the art to which this invention pertains. Although methods and materials similar or equivalent to those described herein can be used to practice the invention, suitable methods and materials are described below. All publications, patent applications, patents, and other references mentioned herein are incorporated by reference in their entirety. In case of conflict, the present specification, including definitions, will control. In addition, the materials, methods, and examples are illustrative only and not intended to be limiting.

[0012] The details of one or more embodiments of the invention are set forth in the accompanying drawings and the description below. Other features, objects, and advantages of the invention will be apparent from the description and drawings, and from the claims.

### DESCRIPTION OF DRAWINGS

[0013] FIG. 1 shows POT32 and POT33 DNA sequences (SEQ ID NOS:1 and 2, respectively) from one allele that is targeted by PPO TALE-nucleases. The underlined or bold sequences represent target sites (SEQ ID NOS:3-14) for TALE-nucleases that recognize the expressed potato tuber-specific PPO genes. In particular, bold sequences indicate target sites for the TALE-nuclease pair POT32_T3. Underlined sequences indicate target sites for TALE-nuclease pairs POT32_T1, POT32_T2, POT33 T1, POT33 T2, and POT33 T3.

[0014] FIG. 2A shows a representative example of a naturally occurring S. tuberosum nucleotide sequence for the tuber-specific PPO, POT32 (SEQ ID NO: 15).

[0015] FIG. 2B shows a representative example of a naturally occurring S. tuberosum nucleotide sequence for the tuber-specific PPO, POT33 (SEQ ID NO: 16).

[0016] FIG. 3 shows nucleic acid sequences from two different StPOT32 alleles identified in S. tuberosum (Ranger Russet). Alleles 1 and 2 are shown in SEQ ID NOS:2340 and 2341, respectively.

[0017] FIG. 4 shows nucleic acid sequences from two different StPOT33 alleles identified in S. tuberosum (Ranger Russet). Alleles 1 and 2 are shown in SEQ ID NOS:2342 and 2343, respectively.

[0018] FIG. 5 shows sequences with deletions identified in POT32 from plant St381. The mutations included a 7 bp deletion (SEQ ID NO:2331), an 11 bp deletion (SEQ ID NO:2333), and a 75 bp deletion (SEQ ID NO:2334).

[0019] FIG. 6 shows sequences with deletions identified in POT32 from plant St465. The mutations included a 6 bp deletion (SEQ ID NO:2336), a 9 bp deletion (SEQ ID NO:2337), a 16 bp deletion (SEQ ID NO:2338), and a 46 bp deletion (SEQ ID NO:2339).

[0020] FIG. 7 is a graph plotting the level of polyphenolic-oxidase enzymatic activity in tubers from line St381.

[0021] FIG. 8 shows a POT32 protein sequence (SEQ ID NO:2344). Underlined amino acids indicate the plastid transit peptide sequences at the N-terminus of the protein. Bold amino acids indicate the two copper-binding regions, CuA and CuB.

[0022] FIG. 9 shows a POT33 protein sequence (SEQ ID NO:2345). Underlined amino acids indicate the plastid transit peptide sequences at the N-terminus of the protein. Bold amino acids indicate the two copper-binding regions, CuA and CuB.

### DETAILED DESCRIPTION

[0023] Black spot bruise occurs due to physical impact or following damage to tubers and can cause major losses to commercial potato processors that produce potato chips and French fries. Mechanical damage initiates enzymatic browning, with symptoms including production of black, brown and red pigments. Bruise resistance is a trait important to growers and processors alike, as reduced bruise damage can minimize crop rejection and waste in processing due to automatic discarding of blackened fries and chips.

[0024] The reaction leading to pigment production is catalyzed by PPO, which converts monophenols to o-diphenols and o-dihydroxyphenols to o-quinones (Vamos-Vigyazo, CRC Critical Reviews in Food Science and Nutrition 14:44, 1981). PPO in potato is encoded by a gene family of at least six genes, including POTP1 and POTP2 (Hunt et al., Plant Mol Biol 21:59-68, 1993), as well as POT32, POT33, POT41 and POT72 (Thygesen et al., Plant Physiology 109:525-531, 1995). The genes are differentially expressed, with POT32 being the major form expressed in tubers. POT33 and POT72 also are expressed in tubers, while POTP1 and POTP2 are mainly expressed in leaves and flowers (Thygesen et al., supra). Differential tissue-specific expression of PPO genes also has been observed in tomato (Newman et al., Plant Mol Biol, 21: 1035-1051, 1993). The tomato PPO genes share greater identity with their interspecific homolog (tomato-potato) than with the other intraspecific PPO genes.

[0025] Thus, POT32 is implicated as a candidate gene for enzymatic discoloration. This document provides potato plant varieties, particularly of the species S. tuberosum, which have reduced PPO activity or even lack tuber PPO activity, as well as methods for generating such plant varieties. Methods for using such plant varieties (e.g., by the food industry) to produce bruising resistant potato products also are provided.

[0026] As used herein, the terms “plant” and “plant part” refer to cells, tissues, organs, seeds, and severed parts (e.g., roots, leaves, and flowers) that retain the distinguishing characteristics of the parent plant. “Tuber” refers to a thickened underground part of a stem or rhizome, serving as a food reserve and bearing buds from which new plants arise. “Seed” refers to any plant structure that is formed by continued differentiation of the ovule of the plant, following its normal maturation point at flower opening, irrespective of whether it is formed in the presence or absence of fertilization and irrespective of whether or not the seed structure is fertile or infertile.

[0027] The term “allele(s)” means any of one or more alternative forms of a gene at a particular locus. In a diploid (or amphidiploid) cell of an organism, alleles of a given gene are located at a specific location or locus on a chromosome, with one allele being present on each chromosome of the pair of homologous chromosomes. Similarly, in a tetraploid cell of an organism, one allele is present on each chromosome of the group of four homologous chromosomes. “Heterozygous” alleles are different alleles residing at a specific locus, positioned individually on corresponding homologous chromosomes. “Homozygous” alleles are identical alleles residing at a specific locus, positioned individually on corresponding homologous chromosomes in the cell.

[0028] “Wild type” as used herein refers to a typical form of a plant or a gene as it most commonly occurs in nature. A “wild type PPO allele” is a naturally occurring PPO allele (e.g., as found within naturally occurring S. tuberosum plants) that encodes a functional PPO protein, while a “non-functional mutant PPO allele” is a PPO allele that does not encode a functional PPO protein. Such a “non-functional mutant PPO allele” can include one or more mutations in its nucleic acid sequence, where the mutation(s) result in reduced or even no detectable amount of functional PPO protein in the plant or plant cell in vivo.

[0029] “Mutagenesis” as used herein refers to processes in which mutations are introduced into a selected DNA sequence. Mutations induced by endonucleases generally are obtained by a double-strand break, which can result in an insertion/deletion mutation (“indel”) that can be detected by deep-sequencing analysis. Such mutations can be deletions of several base pairs, including frameshift mutations, that can have the effect of inactivating the mutated allele. In the methods described herein, for example, mutagenesis occurs via double-stranded DNA breaks made by TALE-nucleases targeted to selected DNA sequences in a plant cell. Such mutagenesis results in “TALE-nuclease-induced mutations” (e.g., TALE-nuclease-induced knockouts) and reduced expression of the targeted gene. Following mutagenesis, plants can be regenerated from the treated cells using known techniques (e.g., planting seeds in accordance with conventional growing procedures, followed by self-pollination).

[0030] The term “expression” as used herein refers to the transcription of a particular nucleic acid sequence to produce sense or antisense RNA or mRNA, and/or the translation of an mRNA molecule to produce a polypeptide, with or without subsequent post-translational events.

[0031] “Reducing the expression” of a gene or polypeptide in a plant or a plant cell includes inhibiting, interrupting, knocking-out, or knocking-down the gene or polypeptide, such that transcription of the gene and/or translation of the encoded polypeptide is reduced as compared to a corresponding control plant or plant cell in which expression of the gene or polypeptide is not inhibited, interrupted, knocked-out, or knocked-down. “Reduced expression” encompasses any decrease in expression level (e.g., a decrease of 10% or more, 20% or more, 30% or more, 40% or more, 50% or more, 60% or more, 70% or more, 80% or more, 90% or more, or even 100%) as compared to the corresponding control plant, plant cell, or population of plants or plant cells. In some embodiments, reducing expression by 50% or more may be particularly useful. Expression levels can be measured using methods such as, for example, reverse transcription-polymerase chain reaction (RT-PCR), Northern blotting, dot-blot hybridization, in situ hybridization, nuclear run-on and/or nuclear run-off, RNase protection, or immunological and enzymatic methods such as ELISA, radioimmunoassay, and western blotting.

[0032] The potato genome contains multiple PPO genes, and because cultivated potato is a tetraploid, multiple alleles of each PPO gene are present in each variety. The methods provided herein can be used to inactivate at least one (e.g., at least two, at least three, or all four) functional alleles of one or more (e.g., one, two, three, four, five, or six) PPO genes, thereby removing at least some full-length RNA transcripts and functional PPO protein from potato cells, and in some cases completely removing all full-length RNA transcripts and functional PPO protein encoded by one or more given PPO genes.

[0033] Representative examples of naturally occurring S. tuberosum tuber-specific expressed PPO nucleotide sequences (POT32 (SEQ ID NO:15) and POT33 (SEQ ID NO: 16)) are shown in FIGS. 2A and 2B, respectively. In some embodiments, the S. tuberosum plants, cells, plant parts, seeds, and progeny thereof that are provided herein can have a mutation in each endogenous allele of one or more PPO genes (e.g., each endogenous POT32 allele, each endogenous POT33 allele, or each endogenous POT32 and POT33 allele), such that expression of the gene is reduced or completely inhibited. Thus, in some cases, the plants, cells, plant parts, seeds, and progeny do not exhibit detectable levels of polyphenol oxidase expressed from the PPO genes.

[0034] The plants, plant cells, plant parts, seeds, and progeny provided herein can be generated using a rare-cutting endonuclease system to make a targeted knockout in one or more alleles of one or more PPO genes. Thus, this document provides materials and methods for using rare-cutting endonucleases (e.g., transcription activator-like effector endonucleases (TALE-nucleases)) to generate potato plants and related products (e.g., seeds and plant parts) that are particularly suitable for generating plant material with reduced PPO expression, due to targeted knockouts in the PPO genes. Other sequence-specific nucleases also may be used to generate the desired plant material, including engineered homing endonucleases or zinc finger nucleases (ZFNs).

[0035] The term “rare-cutting endonuclease” as used herein refers to a natural or engineered protein having endonuclease activity directed to a nucleic acid sequence with a recognition sequence (target sequence) about 12-40 bp in length (e.g., 14-40, 15-36, or 16-32 bp in length). See, e.g., Baker, Nature Methods 9:23-26, 2012. Typical rare-cutting endonucleases cause cleavage inside their recognition site, leaving 4 nt staggered cuts with 3′OH or 5′OH overhangs. In some embodiments, a rare-cutting endonuclease can be a meganuclease, such as a wild type or variant homing endonuclease (e.g., belonging to the dodecapeptide family (LAGLIDADG (SEQ ID NO: 17); see, WO 2004/067736). In some embodiments, a rare-cutting endonuclease can be a fusion protein containing a DNA binding domain and a catalytic domain with cleavage activity. TALE-nucleases and ZFNs are examples of fusions of DNA binding domains with the catalytic domain of the endonuclease FokI. Customized TALE-nucleases are commercially available under the trade name TALEN™ (Cellectis, Paris, France).

[0036] Transcription activator-like (TAL) effectors are found in plant pathogenic bacteria in the genus Xanthomonas. These proteins play important roles in disease, or trigger defense, by binding host DNA and activating effector-specific host genes (see, e.g., Gu et al., Nature 435:1122-1125, 2005; Yang et al., Proc. Natl. Acad. Sci. USA 103:10503-10508, 2006; Kay et al. Science 318:648-651, 2007; Sugio et al., Proc. Natl. Acad. Sci. USA 104:10720-10725, 2007; and Romer et al. Science 318:645-648, 2007). Specificity depends on an effector-variable number of imperfect, typically 34 amino acid repeats (Schornack et al., J. Plant Physiol. 163:256-272, 2006; and WO 2011/072246). Polymorphisms are present primarily at repeat positions 12 and 13, which are referred to herein as the repeat variable-diresidue (RVD).

[0037] The RVDs of TAL effectors correspond to the nucleotides in their target sites in a direct, linear fashion, one RVD to one nucleotide, with some degeneracy and no apparent context dependence. This mechanism for protein-DNA recognition enables target site prediction for new target specific TAL effectors, as well as target site selection and engineering of new TAL effectors with binding specificity for the selected sites.

[0038] TAL effector DNA binding domains can be fused to other sequences, such as endonuclease sequences, resulting in chimeric endonucleases targeted to specific, selected DNA sequences, and leading to subsequent cutting of the DNA at or near the targeted sequences. Such cuts (double-stranded breaks) in DNA can induce mutations into the wild type DNA sequence via NHEJ or homologous recombination, for example. In some cases, TALE-nucleases can be used to facilitate site-directed mutagenesis in complex genomes, knocking out or otherwise altering gene function with great precision and high efficiency. As described in the Examples below, TALE-nucleases targeted to the S. tuberosum PPO genes can be used to mutagenize the endogenous gene, resulting in plants without detectable tuber expression of PPO. The fact that some endonucleases (e.g., FokI) function as dimers can be used to enhance the target specificity of the TALE-nuclease. For example, in some cases a pair of TALE-nuclease monomers targeted to different DNA sequences (e.g., the underlined target sequences shown in FIG. 1) can be used. When the two TALE-nuclease recognition sites are in close proximity, as depicted in FIG. 1, the inactive monomers can come together to create a functional enzyme that cleaves the DNA. By requiring DNA binding to activate the nuclease, a highly site-specific restriction enzyme can be created.

[0039] In general, a mutated Solanum plant, plant part, or plant cell as provided herein can have its expression of PPO reduced by 50 percent or more (e.g., by 60 percent or more, 70 percent or more, 80 percent or more, or 90 percent or more) as compared to a control Solanum plant that lacks the mutation(s). Further, the level of quinones in a mutated Solanum plant as provide herein can be decreased by about 50 percent or more (e.g., by 60 percent or more, 70 percent or more, 80 percent or more, or 90 percent or more) as compared to the control Solanum plant or population of Solanum plants. Methods for measuring quinone levels in plants are known in the art. See, e.g., Rauwald, H W, Pharm. Ztg. Wiss. 135:169-181, 1990. The control Solanum plant can be, for example, a corresponding wild-type version of the Solanum plant in which the PPO gene(s) were mutated.

[0040] In some cases, a Solanum plant can contain a PPO nucleotide sequence with at least 75 percent sequence identity to a representative PPO nucleotide sequence. For example, a nucleotide sequence can have at least 75 percent, at least 80 percent, at least 85 percent, at least 90 percent, at least 91 percent, at least 92 percent, at least 93 percent, at least 94 percent, at least 95 percent, at least 96 percent, at least 97 percent, at least 98 percent, or at least 99 percent sequence identity to a representative, naturally occurring PPO nucleotide sequence (e.g., SEQ ID NO:1, 2, 15, or 16).

[0041] In some cases, a mutation can be at a target sequence as set forth in a PPO sequence as set forth herein (e.g., SEQ ID NO: 1 or SEQ ID NO:2), or at a target sequence that is at least 95 percent (e.g., at least 96 percent, at least 97 percent, at least 98 percent, or at least 99 percent) identical to the sequence set forth in a PPO sequence as set forth herein (e.g., SEQ ID NO:1 and SEQ ID NO:2).

[0042] The percent sequence identity between a particular nucleic acid or amino acid sequence and a sequence referenced by a particular sequence identification number is determined as follows. First, a nucleic acid or amino acid sequence is compared to the sequence set forth in a particular sequence identification number using the BLAST 2 Sequences (Bl2seq) program from the stand-alone version of BLASTZ containing BLASTN version 2.0.14 and BLASTP version 2.0.14. This stand-alone version of BLASTZ can be obtained online at fr.com/blast or at ncbi.nlm.nih.gov. Instructions explaining how to use the B12seq program can be found in the readme file accompanying BLASTZ. B12seq performs a comparison between two sequences using either the BLASTN or BLASTP algorithm. BLASTN is used to compare nucleic acid sequences, while BLASTP is used to compare amino acid sequences. To compare two nucleic acid sequences, the options are set as follows: -i is set to a file containing the first nucleic acid sequence to be compared (e.g., C:\seq1.txt); -j is set to a file containing the second nucleic acid sequence to be compared (e.g., C:\seq2.txt); -p is set to blastn; -o is set to any desired file name (e.g., C:\output.txt); -q is set to −1; -r is set to 2; and all other options are left at their default setting. For example, the following command can be used to generate an output file containing a comparison between two sequences: C:\Bl2seq -i c:\seq1.txt -j c:\seq2.txt -p blastn -o c:\output.txt -q −1 -r 2. To compare two amino acid sequences, the options of B12seq are set as follows: -i is set to a file containing the first amino acid sequence to be compared (e.g., C:\seq1.txt); -j is set to a file containing the second amino acid sequence to be compared (e.g., C:\seq2.txt); -p is set to blastp; -o is set to any desired file name (e.g., C:\output.txt); and all other options are left at their default setting. For example, the following command can be used to generate an output file containing a comparison between two amino acid sequences: C:\Bl2seq -i c:\seq1.txt -j c:\seq2.txt -p blastp -o c:\output.txt. If the two compared sequences share homology, then the designated output file will present those regions of homology as aligned sequences. If the two compared sequences do not share homology, then the designated output file will not present aligned sequences.

[0043] Once aligned, the number of matches is determined by counting the number of positions where an identical nucleotide or amino acid residue is presented in both sequences. The percent sequence identity is determined by dividing the number of matches either by the length of the sequence set forth in the identified sequence (e.g., SEQ ID NO:1), or by an articulated length (e.g., 100 consecutive nucleotides or amino acid residues from a sequence set forth in an identified sequence), followed by multiplying the resulting value by 100. For example, a nucleic acid sequence that has 480 matches when aligned with the sequence set forth in SEQ ID NO:1 is 96.0 percent identical to the sequence set forth in SEQ ID NO:1 (i.e., 480÷500×100=96.0). It is noted that the percent sequence identity value is rounded to the nearest tenth. For example, 75.11, 75.12, 75.13, and 75.14 is rounded down to 75.1, while 75.15, 75.16, 75.17, 75.18, and 75.19 is rounded up to 75.2. It also is noted that the length value will always be an integer.

[0044] Methods for selecting endogenous target sequences and generating TALE-nucleases targeted to such sequences can be performed as described elsewhere. See, for example, PCT Publication No. WO 2011/072246, which is incorporated herein by reference in its entirety. In some embodiments, software that specifically identifies TALE-nuclease recognition sites, such as TALE-NT 2.0 (Doyle et al., Nucleic Acids Res 40:W117-122, 2012) can be used.

[0045] Methods for using rare-cutting endonucleases (e.g., TALE-nucleases) to generate potato plants, plant cells, or plant parts having mutations in endogenous genes include, for example, those described in the Examples herein. For example, one or more nucleic acids encoding TALE-nucleases targeted to selected PPO sequences (e.g., the PPO sequences shown in FIG. 1) can be transformed into plant cells (e.g., protoplasts), where they can be expressed. In some cases, one or more TALE-nuclease proteins can be introduced into plant cells (e.g., protoplasts). The cells, or a plant cell line or plant part generated from the cells, can subsequently be analyzed to determine whether mutations have been introduced at the target site(s), through nucleic acid-based assays or protein-based assays to detect expression levels as described above, for example, or using nucleic acid-based assays (e.g., PCR and DNA sequencing, or PCR followed by a T7E1 assay; Mussolino et al., Nucleic Acids Res. 39:9283-9293, 2011) to detect mutations at the genomic loci. In a T7E1 assay, genomic DNA can be isolated from pooled calli, and sequences flanking TALE-nuclease recognition sites for PPO can be PCR-amplified. Amplification products then can be denatured and re-annealed. If the re-annealed fragments form a heteroduplex, T7 endonuclease I cuts at the site of mismatch. The digested products can be visualized by gel electrophoresis to quantify mutagenesis activity of the TALE-nuclease.

[0046] In some embodiments, a method as provided herein can include contacting a population of Solanum plant cells (e.g., protoplasts) having a functional PPO allele with a rare-cutting endonuclease that is targeted to an endogenous PPO sequence, selecting from the population a cell in which at least one (e.g., one, two, three, or four) PPO alleles have been inactivated, and growing the selected cell into a Solanum plant. The plant may have reduced levels of quinones as compared to a control Solanum plant that does contain the inactivated PPO allele(s). The rare-cutting endonuclease can be introduced into the population of cells via a nucleic acid (e.g., a vector or an mRNA) that encodes the rare-cutting endonuclease, or as a protein. In some cases, a method as provided herein can include a step of culturing a plant cell containing the inactivated PPO allele(s) to generate one or more plant lines. In addition or alternatively, a method as provided herein can include a step of isolating genomic DNA containing at least a portion of the PPO locus from the plant cells.

[0047] In some embodiments, a nuclease can be co-delivered with a plasmid encoding one or more exonuclease proteins to increase sequence specific nuclease-induced mutagenesis efficiency. Such exonucleases include, without limitation, members of the Trex (Therapeutic red cell exchange exonucleases) family of exonucleases, such as TREX2 (Shevelev et al., Scientific World Journal 2:275-281, 2002). Co-delivery of an exonuclease such as TREX with one or more TALE-nucleases may increase the frequency of NHEJ events, as compared with the frequency of NHEJ events observed after delivery of TALE-nucleases alone. It is to be noted that other suitable exonucleases also can be used in the methods provided herein.

[0048] Another genome engineering tool that can be used in the methods provided herein is based on the RNA-guided Cas9 nuclease from the type II prokaryotic CRISPR (Clustered Regularly Interspaced Short palindromic Repeats) adaptive immune system (see, e.g., Belahj et al., Plant Methods 9:39, 2013). This system allows for cleavage of DNA sequences that are flanked by a short sequence motif, referred as proto-spacer adjacent motif (PAM). Cleavage is achieved by engineering a specific crRNA that is complementary to the target sequence. The crRNA associates into a living cell with a heterologously expressed Cas9 endonuclease from Streptococcus pyogenes. In the crRNA/Cas9 complex, a dual tracrRNA:crRNA structure acts as a guide RNA that directs the Cas9 endonuclease to the cognate target sequence. Since several PAM motifs are present in the nucleotide sequence of the PPO genes, crRNA specific to the PPO genes can be designed to introduce mutations or to inactivate one or more PPO alleles within Solanum plant cells into which the Cas9 endonuclease and the crRNA are transfected and then expressed. In some embodiments, therefore, this approach can be used to obtain PPO mutant plants as described herein.

[0049] In some embodiments, the Cas protein can be a “functional derivative” of a naturally occurring Cas protein. A “functional derivative” of a native (naturally occurring) polypeptide is a compound having a qualitative biological property in common with the native polypeptide. “Functional derivatives” include, but are not limited to, fragments of native polypeptide, derivatives of a native polypeptide, and derivatives of fragments of a native polypeptide, provided that the fragments and derivatives have a biological activity in common with the corresponding native polypeptide. A biological activity contemplated herein is, for example, the ability of the functional derivative to hydrolyze a DNA substrate into fragments. The term “derivative” encompasses amino acid sequence variants of a polypeptide, covalent modifications of a polypeptide, and polypeptide fusions. Suitable derivatives of a Cas polypeptide or a fragment thereof include, without limitation, mutants, fusions, covalently modified Cas polypeptides, and fragments thereof.

[0050] In some embodiments, the Cas protein can be a NmCas9, StCas9, or SaCas9 polypeptide (see, for example, Esvelt et al., Nat Methods 10:1116-1121, 2013; Steinert et al., Plant J 84:1295-1305; Kaya et al., Sci Rep 6:26871, 2016; Zhang et al., Sci Rep 7:41993, 2017; and Kaya et al., Plant Cell Physiol 58:643-649, 2017). In addition to Cas9, CRISPR systems from Prevotella and Francisella 1 (Cpf1) can be used in the methods provided herein (see, for example, Zetsche et al., Cell 163:759-771, 2015).

[0051] In some embodiments, the plants provided herein can contain further mutations introduced into other Solanum genes. Such mutations can, for example:
[0052] provide acrylamide reduction by modifying the expression of genes involved in asparagine synthesis;
[0053] prevent Potato Virus Y by reducing eIF4E gene expression;
[0054] prevent late blight; and/or
[0055] improve nematode, herbicide, or insect resistance.
   Thus, the methods provided herein can be used to obtain gene stacking in a Solanum trait.

[0056] Further, this document provides bruising resistant tubers that are generated from a Solanum plant or plant part containing a mutation in each PPO allele endogenous to the plant or plant part—such that the plant, plant part, or plant cell has no functional PPO allele.

[0057] In a further embodiment, this document provides a heat-processed product of the plant. The heat-processed product can be a French fry, chip, crisp, potato, dehydrated potato, or baked potato, for example.

[0058] The invention will be further described in the following examples, which do not limit the scope of the invention described in the claims.

### EXAMPLES

### Example 1—Engineering Sequence-Specific Nucleases to Mutagenize the Tuber Specific Expressed PPO Genes

[0059] To identify potential TALE-nuclease target sites, the 5′ ends of the POT32 and POT33 genes were sequenced in Solanum tuberosum (Ranger Russet). Two different alleles were identified for both POT32 (SEQ ID NO:2340 and SEQ ID NO:2341) and POT33 (SEQ ID NO:2342 and SEQ ID NO:2343; see, FIGS. 3 and 4. Sequencing information was used to identify potential target sites for TALE-nucleases.

[0060] To completely inactivate or knock-out the alleles of the PPO genes in S. tuberosum, sequence-specific nucleases were designed to target the protein coding region in the first exon. TALE-nucleases were designed to target one or more tuber-specific expressed PPO genes, in particular POT32 and POT33, within the first 500 bp of the coding sequence, using software that specifically identifies TALE-nuclease recognition sites.

[0061] TALE-nuclease recognition sites for the POT32 and POT33 genes are underlined and bolded in FIG. 1, and are listed in TABLE 1 (SEQ ID NOS:3-14). TALE-nucleases were generated using methods similar to those described elsewhere (Cermak et al., Nucleic Acids Res. 39: e82, 2011; Reyon et al., Nat. Biotechnol. 30:460-465, 2012; and Zhang et al., Nat. Biotechnol. 29:149-153, 2011).

TABLE 1
TALE-nuclease target sequences

| | Target | | Target | |
|---|---|---|---|---|
| | Sequence | SEQ | Sequence | SEQ |
| Gene | Left | ID: | Right | ID: |
| POT32_T1 | TGGCTTAGG | 3 | CTATACCAT | 4 |
| | TGGTCTTT | | TAGCTGCA | |
| POT32_T2 | TCCCTTCTA | 5 | CCTGCTCAT | 6 |
| | TGACTAAG | | GAAGCTAA | |
| POT32_T3 | TCCGTGTTC | 7 | GAGGAGTAT | 8 |
| | GTCAGCCT | | ATTGCCAA | |
| POT33_T1 | TAGGTTCCA | 9 | CTCCATGGA | 10 |
| | CTCCTAAG | | AAACGTAA | |
| POT33_T2 | TAGTGGTGA | 11 | ATTCTGTTG | 12 |
| | CCAAAACC | | ATCGAAGA | |
| POT33_T3 | TGACTAAAC | 13 | GCTGTTGAT | 14 |
| | TCCGTATC | | GAGGAGTA | |

### Example 2—Activity of PPO TALE-Nucleases at their Endogenous Target Sites in S. tuberosum

[0062] TALE-nuclease activity at endogenous target sites in S. tuberosum was measured by expressing the TALE-nucleases in protoplasts and then surveying the TALE-nuclease target sites for mutations introduced by NHEJ. Methods for protoplast preparation were performed as described elsewhere (Shepard, in: Genetic Improvement of Crops/Emergent Techniques, Rubenstein, Gengenbach, Philips, and Green (Eds.), Univ. of Minnesota Press, Minneapolis, Minn., 1980, pp. 185-219; and Shepard and Totten, Plant Physiol. 60:313-316, 1977). Briefly, S. tuberosum mini tubers were planted in moistened vermiculite and grown under low light conditions for 3-5 weeks. Young, fully expanded leaves were collected and surface sterilized, and protoplasts were isolated.

[0063] TALE-nuclease-encoding plasmids, together with a yellow fluorescent protein- (YFP-) encoding plasmid, were introduced into S. tuberosum protoplasts by polyethylene glycol- (PEG-) mediated transformation as described elsewhere (Yoo et al., Nature Protocols 2:1565-1572, 2007). In some cases, a plasmid encoding a TREX2 exonuclease was co-delivered with the TALE-nuclease-encoding plasmid. Twenty-four hours after treatment, transformation efficiency was measured using a fluorescent microscope to monitor YFP fluorescence in an aliquot of the transformed protoplasts. The remainder of the transformed protoplasts was harvested, and genomic DNA was prepared using a hexadecyltrimethylammonium bromide-(CTAB-) based method. Using genomic DNA prepared from the protoplasts as a template, a DNA fragment encompassing the TALE-nuclease recognition site was amplified by PCR. Allele types were analyzed by individual clonal direct sequencing and 454 pyro-sequencing. Sequencing reads with indel mutations in the spacer region were considered to be derived from imprecise repair of a cleaved TALE-nuclease recognition site by NHEJ. Mutagenesis frequency was calculated as the number of sequencing reads with NHEJ mutations out of the total sequencing reads.

[0064] Primers used to amplify the TALE-nuclease target sites within the POT32 and POT33 genes are shown in TABLE 2.

TABLE 2
Pruner sequences for amplifying
POT32 and POT33 TALE target sequences

| Primer | | | SEQ |
|---|---|---|---|
| pair | | Forward Primer Sequence | ID: |
| POT32 | Forward | GCAAGCTTGTGCAATAGTAGTAG | 18 |
| | Reverse | AACCAATAGGGTTTAAAGGTTG | 19 |
| POT33 | Forward | CAAGTGTGTGCAATAGTAGTTCTAC | 20 |
| | Reverse | CCAAGAGGGTTTAAAGGGTC | 21 |

[0065] Sequences containing mutations introduced by TALE nuclease pair POT32_T1 within the POT32 alleles are set forth in SEQ ID NOs:22-112, with sequences containing deletions introduced by TALE nuclease pair POT32_T1 set forth in SEQ ID NOs:22-96, and insertions introduced by TALE nuclease pair POT32_T1 set forth in SEQ ID NOs:97-112.

[0066] Sequences containing mutations introduced by TALE nuclease pair POT32_T2 within the POT32 alleles are set forth in SEQ ID NOs: 113-711. In particular, sequences containing deletions introduced by TALE nuclease pair POT32_T2 are set forth in SEQ ID NOs:113-600, and sequences containing insertions introduced by TALE nuclease pair POT32_T2 are set forth in SEQ ID NOs:601-711.

[0067] Sequences containing mutations introduced by TALE nuclease pair POT32_T03 within the POT32 alleles are set forth in SEQ ID NOs:712-1228. Specifically, sequences containing deletions introduced by TALE nuclease pair POT32_T3 are set forth in SEQ ID NOs:712-1171, and sequences containing insertions introduced by TALE nuclease pair POT32_T3 are set forth in SEQ ID NOs:1172-1228.

[0068] Sequences containing mutations introduced by TALE nuclease pair POT33_T1 within the POT33 alleles are set forth in SEQ ID NOs:1229-1514, with sequences containing deletions introduced by TALE nuclease pair POT33_T1 set forth in SEQ ID NOs: 1229-1475, and sequences containing insertions introduced by TALE nuclease pair POT33_T1 set forth in SEQ ID NOs:1476-1514.

[0069] Sequences containing mutations introduced by TALE nuclease pair POT33_T2 within the POT33 alleles are set forth in SEQ ID NOs:1515-1953. Specifically, sequences containing deletions introduced by TALE nuclease pair POT33_T2 are set forth in SEQ ID NOs:1515-1857, and sequences containing insertions introduced by TALE nuclease pair POT33_T2 are set forth in SEQ ID NOs:1858-1953.

[0070] Sequences containing mutations introduced by TALE nuclease pair POT33_T3 within the POT33 alleles are set forth in SEQ ID NOs: 1954-2330. In particular, sequences containing deletions introduced by TALE nuclease pair POT33_T3 are set forth in SEQ ID NOs:1954-2231, and sequences containing insertions introduced by TALE nuclease pair POT33_T3 are set forth in SEQ ID NOs:2232-2330.

### Example 3—Regenerating S. tuberosum Lines with TALE-Nuclease-Induced PPO Mutations

[0071] S. tuberosum lines were created with mutations in one or more alleles of POT32 and POT33. Protoplasts isolated from surface sterilized leaves were transformed with plasmids encoding the following: (i) TALE-nuclease PPO_Tx or (ii) TALE-nuclease PPO_Tx+TREX2. Transformation efficiencies were monitored by delivery of a YFP plasmid, which was visualized using fluorescence microscopy or flow cytometry.

[0072] After PEG-mediated transformation, protoplasts are cultured using methods and media described elsewhere (Gamborg et al., in: Plant Tissue Culture Methods and Applications in Agriculture (pp. 115-153), Thorpe (Ed.), Academic Press, Inc., New York, N.Y., 1981), with slight modifications. Protoplasts are re-suspended in liquid plating medium at a cell density of 1×10⁵/ml in a small Petri dish, and stored at 25° C. in the dark. At 14 days post transformation (dpt), when the majority of the protoplasts have divided at least once, the protoplast culture is diluted two-fold in a suspension of P.-medium. At 28 dpt, the protoplast cultures are plated on a solid reservoir (10 ml) of CUL medium (Haberlach et al., Plant Science 39:67-74, 1985). At this point, protoplast-derived calli are visible to the eye.

[0073] At 65 dpt, protoplast-derived calli identified as mutants are transferred to a solid reservoir of DIF medium (Haberlach et al., supra). Calli are transferred to fresh DIF medium at biweekly intervals. As shoots form, they are excised and placed into a solid reservoir of R.-medium (Gamborg et al., supra). These individual calli are transferred to shoot-inducing medium. Once roots form, they are transferred to soil and grown to maturity for tuber production.

### Example 4—Verifying S. tuberosum Lines with TALE-Nuclease-Induced PPO Mutations

[0074] Once the protoplast-derived S. tuberosum lines were regenerated to plantlets, all alleles of the PPO genes were assessed for mutations. Plants with putative mutations in the PPO gene were verified by PCR amplification of the target locus, and subsequently sequenced.

[0075] Two mutant S. tuberosum plants were identified from protoplasts transformed with TALE-nuclease pair POT32_T3. The mutant plants are referred to as St381 and St465.

[0076] Deletions identified in POT32 from plant St381 are shown in FIG. 5. The mutations included a 7 bp deletion (SEQ ID NO:2331), an 11 bp deletion (SEQ ID NO:2333), and a 75 bp deletion (SEQ ID NO:2334).

[0077] Deletions identified in POT32 from plant St465 are shown in FIG. 6. The mutations included a 6 bp deletion (SEQ ID NO:2336), a 9 bp deletion (SEQ ID NO:2337), a 16 bp deletion (SEQ ID NO:2338), and a 46 bp deletion (SEQ ID NO:2339).

### Example 5—Determining Whether Mutant S. tuberosum Lines have Desired Phenotypes

[0078] PPO transcript quantification is determined using quantitative real-time PCR of cDNA generated from mutant and control tuber mRNA extracts (Bhaskar et al., Plant Physiol. 154(2):939-948, 2010). The level and change (e.g., reduction) of PPO expression is quantified using the comparative cycle threshold method (Livak and Schmittgen, Method. Methods 25:402-408, 2001). Tuber-specific polyphenol oxidase levels is assessed using methods and media described elsewhere (Thygesen et al., supra).

[0079] For the phenotypic analysis, the relative polyphenolic-oxidase enzymatic activity was assayed. Tissue from potato tubers was homogenized by mortar and pestle and extracted in a cold, buffered detergent solution (100 mM NaP at pH 6.0, 2% TX-100, 2% PVP). Total protein content was quantified by Bradford Assay against a BSA standard curve. Extracts were added to a buffered solution of 4-methylcatechol (50 mM NaP at pH 6.0, 0.1% SDS, 15 mM 4-methylcatechol) and monitored for change in absorbance at 400 nm in 5 second intervals for 1.5 minutes. Relative reaction rate was determined by dividing the rate of absorbance change by the mg total protein added for each reaction.

[0080] The polyphenolic-oxidase enzymatic activity assays indicated that tubers from St381 plants had different levels of polyphenolic-oxidase enzymatic activity than tubers from wild type plants (FIG. 7). Tubers from wild type plants had an observed polyphenolic-oxidase enzymatic activity [rate (Abs/sec) per mg protein] of 8.89. Four tubers from each of four different St381 plants were assayed. Tubers 9014426090-9014426093 from the first St381 plant had observed polyphenolic-oxidase enzymatic activities of 4.90, 5.73, 10.46, and 9.24. Tubers 9014426094-9014426097 from the second St381 plant had observed polyphenolic-oxidase enzymatic activities of 5.80, 4.54, 12.79, and 10.91. Tubers 9014426098-9014426101 from the third St381 plant had observed polyphenolic-oxidase enzymatic activities of 4.45, 5.66, 5.40, and 6.62. Tubers 9014426102-9014426105 from the fourth St381 plant had observed polyphenolic-oxidase enzymatic activities of 8.76, 6.49, 2.82, and 7.06.

[0081] These results indicated that TALE-nuclease-induced mutations within the POT32 gene can result in potato tubers with reduced polyphenolic-oxidase activity, as compared to potato tubers from unmodified plants.

### Example 6—POT TALE-Nucleases Targeting Copper-Binding Regions

[0082] Polyphenol oxidase enzymes proteins are a group of copper-binding proteins that are widely distributed phylogenetically from bacteria to mammals, and that catalyze the oxidation of phenolics to quinones and produce brown pigments in wounded tissues. The amino acid sequence of POT32 is shown in FIG. 8 (SEQ ID NO:2344). The amino acid sequence of POT33 is shown in FIG. 9 (SEQ ID NO:2345). Both POT proteins have putative plastid transit peptide sequences at their N-termini, and contain two copper-binding regions, CuA and CuB. Additional TALE-nucleases can be designed to reduce PPO expression by producing in-frame or frameshift mutations within the POT32 and POT33 copper-binding regions. A list of additional TALE-nuclease target sites is shown in TABLE 3.

TABLE 3
TALE-nuclease target sequences

| | | Target | | Target | |
|---|---|---|---|---|---|
| | | sequence | SEQ | sequence | SEQ |
| Gene | Region | left | ID: | right | ID: |
| POT32 | CuA | TCTTGGCTT | 2346 | CTTGTACTT | 2347 |
| | | TTCTTCCC | | CCACGAGA | |
| POT32 | CuA | TTGGCTTTT | 2348 | TGTACTTCC | 2349 |
| | | CTTCCCGT | | ACGAGAGA | |
| POT32 | CuB | TGGTCTGGT | 2350 | CAATGGTGC | 2351 |
| | | ACAGTGAG | | AATATCAA | |
| POT33 | CuA | TGGCTTTTC | 2352 | TATACTTCT | 2353 |
| | | TTCCCGTT | | ACGAGAGA | |
| POT33 | CuB | TACCTGTCC | 2354 | GGTTCAACA | 2355 |
| | | ATATTTGG | | TTTCCTAA | |
| POT33 | CuB | TTGGGCTGG | 2356 | CTAATGGTG | 2357 |
| | | TACAGTAC | | ATACGTCA | |
| POT33 | CuB | TCCTAATGG | 2358 | TGGGTAATT | 2359 |
| | | TGATACGT | | TCTACTCA | |
| POT33 | CuB | TGGGTAATT | 2360 | GTTTTCTAT | 2361 |
| | | TCTACTCA | | TGCCACCA | |
| POT33 | CuB | TAGACCCGG | 2362 | GTGGACCGT | 2363 |
| | | TTTTCTAT | | ATGTGGAA | |

### OTHER EMBODIMENTS

[0083] It is to be understood that while the invention has been described in conjunction with the detailed description thereof, the foregoing description is intended to illustrate and not limit the scope of the invention, which is defined by the scope of the appended claims. Other aspects, advantages, and modifications are within the scope of the following claims.

The application's sequence listing, which the Patent Office published only in electronic form, follows.

SEQUENCE LISTING (2363 sequences)

SEQ ID NO: 1 - DNA, 500 bp, Solanum tuberosum
  StPOT32 Allele 1
aattctgttgatcgaagaaatgttcttcttggcttaggtggtctttatggtgttgctaatgctataccattagctgcatccgctgctccagctccacctcctgatctctcgtcttgtagtatagccaggattaacgaaaatcaggtggtgccgtacagttgttgcgcgcctaagcctgatgatatggagaaagttccgtattacaagttcccttctatgactaagctccgtgttcgtcagcctgctcatgaagctaatgaggagtatattgccaagtacaatctggcgattagtcgaatgaaagatcttgataagacacaacctttaaaccctattggttttaagcaacaagctaatatacattgtgcttattgtaacggtgcttatagaattggtggcaaagagttacaagttcataattcttggcttttcttcccgttccatagatggtacttgtacttccacgagagaatcgtgggaaaattcattgatgatccaac

SEQ ID NO: 2 - DNA, 500 bp, Solanum tuberosum
  StPOT33 Allele 1
tgtgcaatagtagttctactactacaactctcaaaactcctttcatttcatccaatacttctttaggttccactcctaagccctctcaacttttcctccatggaaaacgtaacaaaactttcaaagtctcttgcaaagtttctaatagtggtgaccaaaaccaaaacattgaaacgaattctgttgatcgaagaaatgttcttcttggcttaggaggtctttatggtgttgctaatgctataccattagcagcatcggctactcctataccatcccctgatctcaaaacttgtggtagagccaccatatcggatggtccactagtaccctatacttgttgcccccctcctatgccaactaactttgacaccattccatattacaagttcccttctatgactaaactccgtatccgtccccctgctcatgctgttgatgaggagtatattgctaagtataatttggccataagtcgaatgaaagatcttgataagacagac

SEQ ID NO: 3 - DNA, 17 bp, Solanum tuberosum
  POT32_T1 target sequence
tggcttaggtggtcttt

SEQ ID NO: 4 - DNA, 17 bp, Solanum tuberosum
  POT32_T1 target sequence
ctataccattagctgca

SEQ ID NO: 5 - DNA, 17 bp, Solanum tuberosum
  POT32_T2 target sequence
tcccttctatgactaag

SEQ ID NO: 6 - DNA, 17 bp, Solanum tuberosum
  POT32_T2 target sequence
cctgctcatgaagctaa

SEQ ID NO: 7 - DNA, 17 bp, Solanum tuberosum
  POT32_T3 target sequence
tccgtgttcgtcagcct

SEQ ID NO: 8 - DNA, 17 bp, Solanum tuberosum
  POT32_T3 target sequence
gaggagtatattgccaa

SEQ ID NO: 9 - DNA, 17 bp, Solanum tuberosum
  POT33_T1 target sequence
taggttccactcctaag

SEQ ID NO: 10 - DNA, 17 bp, Solanum tuberosum
  POT33_T1 target sequence
ctccatggaaaacgtaa

SEQ ID NO: 11 - DNA, 17 bp, Solanum tuberosum
  POT33_T2 target sequence
tagtggtgaccaaaacc

SEQ ID NO: 12 - DNA, 17 bp, Solanum tuberosum
  POT33_T2 target sequence
attctgttgatcgaaga

SEQ ID NO: 13 - DNA, 17 bp, Solanum tuberosum
  POT33_T3 target sequence
tgactaaactccgtatc

SEQ ID NO: 14 - DNA, 17 bp, Solanum tuberosum
  POT33_T3 target sequence
gctgttgatgaggagta

SEQ ID NO: 15 - DNA, 1958 bp, Solanum tuberosum
  POT32 cDNA sequence
tcttttgcgttttgagcaataatggcaagcttgtgcaatagtagtagtacatctctcaaaactccttttacttcttcctccacttctttatcttccactcctaagccctctcaacttttcatccatggaaaacgtaaccaaatgttcaaagtttcatgcaaggttaccaataataacggtgaccaaaaccaaaacgttgaaacaaattctgttgatcgaagaaatgttcttcttggcttaggtggtctttatggtgttgctaatgctataccattagctgcatccgctgctccagctccacctcctgatctctcgtcttgtagtatagccaggattaacgaaaatcaggtggtgccgtacagttgttgcgcgcctaagcctgatgatatggagaaagttccgtattacaagttcccttctatgactaagctccgtgttcgtcagcctgctcatgaagctaatgaggagtatattgccaagtacaatctggcgattagtcgaatgaaagatcttgataagacacaacctttaaaccctattggttttaagcaacaagctaatatacattgtgcttattgtaacggtgcttatagaattggtggcaaagagttacaagttcataattcttggcttttcttcccgttccatagatggtacttgtacttccacgagagaatcgtgggaaaattcattgatgatccaactttcgctttaccatattggaattgggaccatccaaaaggtatgcgttttcctgccatgtatgatcgtgaagggacttcccttttcgatgtaacacgtgaccaaagtcaccgaaatggagcagtaatcgatcttggttttttcggcaatgaagttgaaacaactcaactccagttgatgagcaataatttaacactaatgtaccgtcaaatggtaactaatgctccatgtcctcggatgttctttggcgggccttatgatctcggggttaacactgaactcccgggaactatagaaaacatccctcacggtcctgtccacatctggtctggtacagtgagaggttcaactttgcccaatggtgcaatatcaaacggtgagaatatgggtcatttttactcagctggtttggacccggttttcttttgccatcacagcaatgtggatcggatgtggagcgaatggaaagcgacaggagggaaaagaacggatatcacacataaagattggttgaactccgagttctttttctatgatgaaaatgaaaacccttaccgtgtgaaagtcagagactgtttggacacgaagaagatgggatacgattacaaaccaattgccacaccatggcgtaacttcaagcccttaacaaaggcttcagctggaaaagtgaatacagcttcacttccgccagctagcaatgtattcccattggctaaactcgacaaagcaatttcgttttccatcaataggccgacttcgtcaaggactcaacaagagaaaaatgcacaagaggagatgttgacattcagtagcataagatatgataacagagggtacataaggttcgatgtgttttcgaacgtggacaataatgtgaatgcgaatgagcttgacaaggcggagtttgcggggagttatacaagtttgccacatgttcatagagctggtgagactaatcatatcgcgactgttgatttccagctggcgataacggaactgttggaggatattggtttggaagatgaagatactattgcggtgactctggtgccaaagagaggtggtgaaggtatctccattgaaggtgcgacgatcagtcttgcagattgttaattagtctctattgaatctgctgagattacactttgatggatgatgctctgtttttgttttcttgttctgttttttcctctgttgaaatcagctttgttgcttgatttcattgaagttgttattcaagaataaatcagttacaa

SEQ ID NO: 16 - DNA, 1943 bp, Solanum tuberosum
  POT33 cDNA sequence
gctattagcaatggcaagtgtgtgcaatagtagttctactactacaactctcaaaactcctttcatttcatccaatacttctttaggttccactcctaagccctctcaacttttcctccatggaaaacgtaacaaaactttcaaagtctcttgcaaagtttctaatagtggtgaccaaaaccaaaacattgaaacgaattctgttgatcgaagaaatgttcttcttggcttaggaggtctttatggtgttgctaatgctataccattagcagcatcggctactcctataccatcccctgatctcaaaacttgtggtagagccaccatatcggatggtccactagtaccctatacttgttgcccccctcctatgccaactaactttgacaccattccatattacaagttcccttctatgactaaactccgtatccgtccccctgctcatgctgttgatgaggagtatattgctaagtataatttggccataagtcgaatgaaagatcttgataagacagaccctttaaaccctcttgggtttaagcaacaagcaaatatacattgtgcttattgtaacggtgcttatataattggtggcaaagagttacaagttcataactcatggcttttcttcccgttccatagatggtacttatacttctacgagagaatattgggaaaactcatcgatgatccaactttcgctttaccatattggaattgggatcatccaaagggcatgcgtttacctcccatgttcgatcgtgaaggaacttctatttacgacgaaaggcgtaatcaacaagtccgtaacggaaccgttatggatcttggttcatttggggacaaggtccaaacaactcaactccagttgatgagcaataatttaacactaatgtaccgtcaaatggtaactaatgctccatgtcctcttttgttcttcggtgcgccttacgttcttgggaataacgtcgaagccccgggaaccattgaaaacatccctcatatacctgtccatatttgggctggtacagtacgtggttcaacatttcctaatggtgatacgtcatacggtgaggatatgggtaatttctactcagctggtttagacccggttttctattgccaccacggcaatgtggaccgtatgtggaatgaatggaaggcaataggaggtaagagaagggatttatcagaaaaagattggttgaactctgagttcttcttttatgatgaaaacaaaaagccttaccgtgtgaaagtccgagactgtttggacgcgaagaaaatggggtacgattacgcaccaatgccaactccatggcgtaacttcaaaccaaaaacaaaggcatcagtagggaaagtgaatacaactacactccccccagtgaacaaggtattcccactcacgaagatggataaagccatttcattttccatcaataggcctgcttcatcgcggactcaacaagagaaaaatgaacaagaggagatgttaacgttcgataacataaaatatgataatagagggtatataaggttcgatgtatttctgaacgtggataacaatgtgaatgcgaatgagcttgataaggcagagttcgcggggagttatactagtttgccacatgttcacagagttggcgagaatgatcataccgcgactgttactttccagctggcgataacagaactgttggaggacattggtttggaagatgaagagactattgcggtgactctggtaccaaagaaaggtggtgaaggtatctccattgaaaatgtggagatcaagcttctggattgttaagtacgttctcaattgaatctgctgagattacaactttgatatgttttttacttttgtttttccatgtaacttttcctgttgaaatcagcttgatgcttgatttccttggagttgttattcactaataaaatca

SEQ ID NO: 17 - protein, 9 aa, Artificial
  Dodecapeptide family of homing endonucleases
LAGLIDADG

SEQ ID NO: 18 - DNA, 23 bp, Artificial
  F primer for amplifying POT32 sequence
gcaagcttgtgcaatagtagtag

SEQ ID NO: 19 - DNA, 22 bp, Artificial
  R primer for amplifying POT32 sequence
aaccaatagggtttaaaggttg

SEQ ID NO: 20 - DNA, 25 bp, Artificial
  F primer for amplifying POT33 sequence
caagtgtgtgcaatagtagttctac

SEQ ID NO: 21 - DNA, 20 bp, Artificial
  R primer for amplifying POT33 sequence
ccaagagggtttaaagggtc

SEQ ID NO: 22 - DNA, 464 bp, Artificial
  Mutation introduced by TALE nuclease pair POT32_T01 within a POT32 allele
cctccacttctttaacttccactcctaaaccctctcaacttttcatccatggaaaacgtaaccaaatgttcaaagtttcatgcaaggttaccaataataacggtgaccaaaaccaaaacgttgaaacgaattctgttgatcgaagaaatgttcttcttggcttaggtggtctttatttgctaatgctataccattagctgcatccgctactccatctccacctcctgatctctcgtcttgtagtatagccaggattaacgaaactcatgtggtgccgtacagttgttgcgcgcctaagcctgatgatatggagaaagttccgtattacaagttcccttctatgactaagctccgtgttcgtcagcctgctcatgaagctaatgaggagtatattgccaagtacaatttggcggttagcaagatgagggatcttgataagacacaacctttaaaccctattggtt

SEQ ID NO: 23 - DNA, 456 bp, Artificial
  Mutation introduced by TALE nuclease pair POT32_T01 within a POT32 allele
cctccacttctttatcttccactcctaagccctctcaacttttcatccatggaaaacgtaaccaaatgttcaaagtttcatgcaaggttaccaataataacggtgaccaaaaccaaaacgttgaaacgaattctgttgatcgaagaaatgttcttcttggcttaggtggtctttatgctataccattagctgcatccgctgctccagctccacctcctgatctctcgtcttgtagtatagccaggattaacgaaaatcaggtggtgccgtacagttgttgcgcgcctaagcctgatgatatggagaaagttccgtattacaagttcccttctatgactaagctccgtgttcgtcagcctgctcatgaagctaatgaggagtatattgccaagtacaatttggcggttagcaagatgagggatcttgataagacacaaccttttaaaccctatggtt

SEQ ID NO: 24 - DNA, 458 bp, Artificial
  Mutation introduced by TALE nuclease pair POT32_T01 within a POT32 allele
cctccacttctttaacttccactcctaaaccctctcaacttttcatccatggaaaacgtaaccaaatgttcaaagtttcatgcaaggttaccaataataacggtgaccaaaaccaaaacgttgaaacgaattctgttgatcgaagaaatgttcttcttggcttaggtggtcttctaatgctataccattagctgcatccgctactccatctccacctcctgatctctcgtcttgtagtatagccaggattaacgaaactcatgtggtgccgtacagttgttgcgcgcctaagcctgatgatatggagaaagttccgtattacaagttcccttctatgactaagctccgtgttcgtcagcctgctcatgaagctaatgaggagtatattgccaagtacaatttggcggttagcaagatgagggatcttgataagacacaacctttaaaccctattggtt

SEQ ID NO: 25 - DNA, 439 bp, Artificial
  Mutation introduced by TALE nuclease pair POT32_T01 within a POT32 allele
cctccacttctttatcttccactcctaagcccctctcaacttttcatccatggaaaacgtaaccaaatgttcaaagtttcatgcaaggttatcaataataacggtgaccaaaacgttgaaacgaattctgttgatcgaagaaatgttcttcttggcttaggtggtctttatggtttagctgcatccgctgctccaactccacctcctgatctctcgtcttgtagtatagccaggattaacgaaaatcaggtggtgccgtacagttgttgcgcgcctaagcctgatgatatggagaaagttccgtattacaagttcccttctatgactaagctccgtgttcgtcagcctgctcatgaagctaatgaggagtatattgccaagtacaatttggcggttagcaagatgagggatcttgataagacacaacctttaaacccta

SEQ ID NO: 26 - DNA, 452 bp, Artificial
  Mutation introduced by TALE nuclease pair POT32_T01 within a POT32 allele
cctccacttctttatcttccactcctaagcccctctcaacttttcatccatggaaaacgtaaccaaatgttcaaagtttcatgcaaggttatcaataataacggtgaccaaaacgttgaaacgaattctgttgatcgaagaaatgttcttcttggcttaggtggtctttaatgctataccattagctgcatccgctgctccaactccacctcctgatctctcgtcttgtagtatagccaggattaacgaaaatcaggtggtgccgtacagttgttgcgcgcctaagcctgatgatatggagaaagttccgtattacaagttcccttctatgactaagctccgtgttcgtcagcctgctcatgaagctaatgaggagtatattgccaagtacaatctggcgattagtcgaatgagagatcttgataagacacaacctttaaaccctattggtt

SEQ ID NO: 27 - DNA, 459 bp, Artificial
  Mutation introduced by TALE nuclease pair POT32_T01 within a POT32 allele
cctccacttctttaacttccactcctaagccctctcaacttttcatccatggaaaacgtaaccaaatgttcaaagtttcatgcaaggttaccaataataacggtgaccaaaaccaaaacgttgaaacgaattctgttgatcgaagaaatgttcttcttggcttaggtggtctttatggtgctataccattagctgcatccgctgctccagctccacctcctgatctctcgtcttgtagtatagccaggattaacgaaaatcaggtggtgccgtacagttgttgcgcgcctaagcctgatgatatggagaaagttccgtattacaagttcccttctatgactaagctccgtgttcgtcagcctgctcatgaagctaatgaggagtatattgccaagtacaatctggcgattagtcgaatgaaagatcttgataagacacaacctttaaaccctattggtt

SEQ ID NO: 28 - DNA, 435 bp, Artificial
  Mutation introduced by TALE nuclease pair POT32_T01 within a POT32 allele
cctccacttctttatcttccactcctaagcccctctcaacttttcatccatggaaaacgtaaccaaatgttcaaagtttcatgcaaggttatcaataataacggtgaccaaaaccaaaacgttgaaacgaattctgttgatcgaagaaatgttcttcttggcttaggtggtctttatggtgaatgctataccattagctgcatccgctgctccagctccacctcctgatctctcgtcttgtagtatagccaggattaacgaaaatcaggtggtgccgtacagttgttgcgcgcctaagcctgatgatatggagaaagttccgtattacaagttcccttctatgactaagctccgtgttcgtcagcctgctcatgaagctaatgaggagtatattgccaagtacaatttggcggttagcaagatgagggatcttga

SEQ ID NO: 29 - DNA, 457 bp, Artificial
  Mutation introduced by TALE nuclease pair POT32_T01 within a POT32 allele
cctccacttctttatcttccactcctaagcccctctcaacttttcatccatggaaaacgtaaccaaatgttcaaagtttcatgcaaggttatcaataataacggtgaccaaaacgttgaaacgaattctgttgatcgaagaaatgttcttcttggcttaggtggtctttatggtaatgctataccattagctgcatccgctgctccaactccacctcctgatctctcgtcttgtagtatagccaggattaacgaaaatcaggtggtgccgtacagttgttgcgcgcctaagcctgatgatatggagaaagttccgtattacaagttcccttctatgactaagctccgtgttcgtcagcctgctcatgaagctaatgaggagtatattgccaagtacaatctggcgattagtcgaatgaaagatcttgataagacacaacctttaaaccctattggtt

SEQ ID NO: 30 - DNA, 459 bp, Artificial
  Mutation introduced by TALE nuclease pair POT32_T01 within a POT32 allele
cctccacttctttaacttccactcctaagccctctcaacttttcatccatggaaaacgtaaccaaatgttcaaagtttcatgcaaggttaccaataataacggtgaccaaaaccaaaacgttgaaacgaattctgttgatcgaagaaatgttcttcttggcttaggtggtctttataatgctataccattagctgcatccgctgctccagctccacctcctgatctctcgtcttgtagtatagccaggattaacgaaaatcaggtggtgccgtacagttgttgcgcgcctaagcctgatgatatggagaaagttccgtattacaagttcccttctatgactaagctccgtgttcgtcagcctgctcatgaagctaatgaggagtatattgccaagtacaatctggcgattagtcgaatgaaagatcttgataagacacaacctttaaaccctattggtt

SEQ ID NO: 31 - DNA, 461 bp, Artificial
  Mutation introduced by TALE nuclease pair POT32_T01 within a POT32 allele
cctccacttctttaacttccactcctaaaccctctcaacttttcatccatggaaaacgtaaccaaatgttcaaagtttcatgcaaggttaccaataataacggtgaccaaaaccaaaacgttgaaacgaattctgttgatcgaagaaatgttcttcttggcttaggtggtctttatggtatgctataccattagctgcatccgctgctccagctccacctcctgatctctcgtcttgtagtatagccaggattaacgaaaatcaggtggtgccgtacagttgttgcgcgcctaagcctgatgatatggagaaagttccgtattacaagttcccttctatgactaagctccgtgttcgtcagcctgctcatgaagctaatgaggagtatattgccaagtacaatttggcggttagcaagatgagggatcttgataagacacaacctttaaaccctattggtt

SEQ ID NO: 32 - DNA, 461 bp, Artificial
  Mutation introduced by TALE nuclease pair POT32_T01 within a POT32 allele
cctccacttctttatcttccactcctaagccctctcaacttttcatccatggaaaacgtaaccaaatgttcaaagtttcatgcaaggttaccaataataacggtgaccaaaaccaaaacgttgaaacaaattctgttgatcgaagaaatgttcttcttggcttaggtggtctttatggtatgctataccattagctgcatccgctactccatctccacctcctgatctctcgtcttgtagtatagccaggattaacgaaactcatgtggtgccgtacagttgttgcgcgcctaagcctgatgatatggagaaagttccgtattacaagttcccttctatgactaagctccgtgttcgtcagcctgctcatgaagctaatgaggagtatattgccaagtacaatttggcggttagcaagatgagggatcttgataagacacaacctttaaaccctattggtt

SEQ ID NO: 33 - DNA, 430 bp, Artificial
  Mutation introduced by TALE nuclease pair POT32_T01 within a POT32 allele
  misc_feature (297): n is a or c or t or g
ctccacttctttaacttccactcctaaaccctctcaactttcatccatggaaacgtaaccaaatgttcaaagtttcatgcatggttaccaataataacggtgaccaaaaccaaaacgttgaaacgaattctgttgatcgaagaaatgttcttcttggcttaggtggtcttttataccattagctgcatccgctgctccagctccacctcctgatctctcgtcttgtagtatagccaggattaacgaaaatcaggtggtgccgtacagttgttgcgcgcctaagcctgatgatatggngaaagttccgtattacaagttcccttctatgactaagctccgtgttcgtcagcctgctcatgaagctaatgaggagtatattgccaagtacaatctggcgattagtcgaatgaaagatcttgataagacacaa

SEQ ID NO: 34 - DNA, 462 bp, Artificial
  Mutation introduced by TALE nuclease pair POT32_T01 within a POT32 allele
cctccacttctttatcttccactcctaagccctctcaacttttcatccatggaaaacgtaaccaaatgttcaaagtttcatgcaaggttaccaataataacggtgaccaaaaccaaaacgttgaaacgaattctgttgatcgaagaaatgttcttcttggcttaggtggtctttatggtaatgctataccattagctgcatccgctgctccagctccacctcctgatctctcgtcttgtagtatagccaggattaacgaaaatcaggtggtgccgtacagttgttgcgcgcctaagcctgatgatatggagaaagttccgtattacaagttcccttctatgactaagctccgtgttcgtcagcctgctcatgaagctaatgaggagtatattgccaagtacaatttggcggttagcaagatgagggatcttgataagacacaacctttaaaccctattggtt

SEQ ID NO: 35 - DNA, 442 bp, Artificial
  Mutation introduced by TALE nuclease pair POT32_T01 within a POT32 allele
cctccacttctttaacttccactcctaaaccctctcaacttttcatccatggaaaacgtaaccaaatgttcaaagtttcatgcaaggttaccataataacggtgaccaaaaccaaaacgttgaaacgaattctgttgatcgaagaaatgttcttcttggcttaggtggtctttattgctaatgctataccattagctgcatccgctactccatctccacctcctgatctctcgtcttgtagtatagcccaggattaacgaaactcatgtggtgccgtacagttgttgcgcgcctaagcctgatgatatggagaaagcttccgtattacaagttcccttctatgactaagctccgtgttcgtcagcctgctcatgaagctaatgaggagtatcattgccaagtacaatttggcggttagcaagatgagggatcttgataagac

SEQ ID NO: 36 - DNA, 467 bp, Artificial
  Mutation introduced by TALE nuclease pair POT32_T01 within a POT32 allele
cctccacttctttaacttccactcctaagccctctcaacttttcatccatggaaaacgtaaccaaatgttcaaagtttcatgcaaggttaccaataataacggtgaccaaaaccaaaacgttgaaacgaattctgttgatcgaagaaatgttcttcttggcttaggtggtctttatggtgttatgacgtataccattagctgcatccgctgctccagctccacctcctgatctctcgtcttgtagtatagccaggatttaacgaaaatcaggtggtgccgtacagttgttgcgcgcctaagcctgatgatatggagaaagttccgtattacaagttcccttctatgactaagctccgtgttcgtcagcctgctcatgaagctaatgaggagtatattgccaagtacaatctggcgattagtcgaatgaaagatcttgataagacacaacctttaaaccctattggtt

SEQ ID NO: 37 - DNA, 457 bp, Artificial
  Mutation introduced by TALE nuclease pair POT32_T01 within a POT32 allele
cctccacttctttatcttccactcctaagcccctctcaacttttcatccatggaaaacgtaaccaaatgttcaaagtttcatgcaaggttaccaataataacggtgaccaaaaccaaaacgttgaaacgaattctgttgatcgaagaaatgttcttcttggcttaggtggtctttatgctataccattagctgcatccgctgctccagctccacctcctgatctctcgtcttgtagtatagccaggattaacgaaaatcaggtggtgccgtacagttgttgcgcgcctaagcctgatgatatggagaaagttccgtattacaagttcccttctatgactaagctccgtgttcgtcagcctgctcatgaagctaatgaggagtatattgccaagtacaatttggcggttagcaagatgaggggatcttgataagacacaacctttaaaccctatggtt

SEQ ID NO: 38 - DNA, 465 bp, Artificial
  Mutation introduced by TALE nuclease pair POT32_T01 within a POT32 allele
cctccacttctttaacttccactcctaaaccctctcaacttttcatccatggaaaacgtaaccaaatgttcaaagtttcatgcaaggttaccaataataacggtgaccaaaaccaaaacgttgaaacgaattctgttgatcgaagaaatgttcttcttggcttaggtggtctttatggtgttaatgctataccattagctgcatccgctactccatctccacctcctgatctctcgtcttgtagtatagccaggattaacgaaactcatgtggtgccgtacagttgttgcgcgcctaagcctgatgatatggagaaagttccgtattacaagttcccttctatgactaagctccgtgttcgtcagcctgctcatgaagctaatgaggagtatattgccaagtacaatttggcggttagcaagatgagggatcttgataagacacaacctttaaaccctattggtt

SEQ ID NO: 39 - DNA, 453 bp, Artificial
  Mutation introduced by TALE nuclease pair POT32_T01 within a POT32 allele
cctccacttctttatcttccactcctaagccctctcaacttttcatccatggaaaacgtaaccaaatgttcaaagtttcatgcaaggttaccaataataacggtgaccaaaaccaaaacgttgaaacgaattctgttgatcgaagaaatgttcttcttggcttaggtggtctttatggtaatgctataccattagctgcatccgctgctccagctccacctcctgatctctcgtcttgtagtatagccaggattaacgaaaatcaggtgggtgccgtacagttgttgcgcgcctaagcctgatgatatggagaaagttccgtattacaagttcccttctatgactaagctccgtgttcgtcagcctgctcatgaagctaatgaggagtatattgccaagtacaatttggcggttagcaagatgagggatcttgataagacacaaccttttaaa

SEQ ID NO: 40 - DNA, 460 bp, Artificial
  Mutation introduced by TALE nuclease pair POT32_T01 within a POT32 allele
  misc_feature (186); (200): n is a or c or t or g
cctccacttctttacttccactcctaagccctctcaacttttcatccatggaaaacgtaaccaaatgttcaaagtttcatgcaaggttaccaataataacggtgaccaaaaccaaaacgttgaaacaaattctgttgatcgaagaaatgttcttcttggcttaggtggtctttatggtatgctatnctagctgctcatcngctccagctccacctcctgatctctcgtcttgtagtatagcccaggatttaacgaaaatcaggtgggtgcccgtacagttgttgcgcgcctaagcctgatgatatggagaaagttccgtattacaagttcccttctatgactaagctccgtgttcgtcagcctgctcatgaagctaatgaggagtatattgccaagtacaatctggcgattagtcgaatgaaagatcttgataagacacaacctttaaaccctattggtt

SEQ ID NO: 41 - DNA, 462 bp, Artificial
  Mutation introduced by TALE nuclease pair POT32_T01 within a POT32 allele
cctccacttctttatcttccactcctaagccctctcaacttttcatccatggaaaacgtaaccaaatgttcaaagtttcatgcaaggttaccaataataacggtgaccaaaaccaaaacgttgaaacaaattctgttgatcgaagaaatgttcttcttggcttaggtggtctttatggtaatgctataccattagctgcatccgctgctccagctccacctcctgatctctcgtcttgtagtatagccaggattaacgaaaatcaggtggtgccgtacagttgttgcgcgcctaagcctgatgatatggagaaagttccgtattacaagttcccttctatgactaagctccgtgttcgtcagcctgctcatgaagctaatgaggagtatattgccaagtacaatctggcgattagtcgaatgaaagatcttgataagacacaacctttaaaccctattggtt

SEQ ID NO: 42 - DNA, 421 bp, Artificial
  Mutation introduced by TALE nuclease pair POT32_T01 within a POT32 allele
cctccacttctttaacttccactcctaaaccctctcaacttttcatccatggaaaacgtaaccaaatgttcaaagtttcatgcaaggttaccaataataacggtgaccaaaaccaaaacgttgaaacgaattctgttgatcgaagaaatgttcttcttggcttaggtggtctttatgaatgctataccattagctgcatccgctgctccagctccacctcctgatctctcgtcttgtagtatagccaggattaacgaaaatcaggtggtgccgtacagttgttgcgcgcctaagcctgatgatatggagaaagttccgtattacaagttcccttctatgactaagctccgtgttcgtcagcctgctcatgaagctaatgaggagtatattgccaagtacaatttggcggttagcaagatga

SEQ ID NO: 43 - DNA, 375 bp, Artificial
  Mutation introduced by TALE nuclease pair POT32_T01 within a POT32 allele
cctccacttctttaacttccactcctaaaccctctcaacttttcatccatggaaaacgtaaccaaatgttcaaagtttcatgcatgttaccaataatacggtgaccaaaaccaaacgttgaaacgaattctgttgatcgaagaaatgttcttcttgggcttaggtggtctttaatgctataccattagctgcatccgctactccatctccacctcctgatctctcgtcttgtagtatagccaggattaacgaaactcatgtggtgccgtacagttgttgcgcgcctaagcctgatgatatggagaaagttccgtattacaagttcccttctatgactaagctccgtgttcgtcagcctgctcatgaagctaatga

SEQ ID NO: 44 - DNA, 422 bp, Artificial
  Mutation introduced by TALE nuclease pair POT32_T01 within a POT32 allele
cctccacttctttaacttccactcctaaaccctctcaacttttcatccatggaaaacgtaaccaaatgttcaaagtttcatgcaaggttaccaataataacggtgaccaaaaccaaaacgttgaaacgaattctgttgatcgaagaaatgttcttcttggcttaggtggtctttatggtatgctataccattagctgcatccgctgctccagctccacctcctgatctctcgtcttgtagtatagccaggattaacgaaaatcaggtggtgccgtacagttgttgcgcgcctaagcctgatgatatggagaaagttccgtattacaagttcccttctatgactaagctccgtgttcgtcagcctgctcatgaagctaatgaggagtatattgccaagtacaatttggcggttagcaagatga

SEQ ID NO: 45 - DNA, 455 bp, Artificial
  Mutation introduced by TALE nuclease pair POT32_T01 within a POT32 allele
cctccacttctttatcttccactcctaagccctctcaacttttcatccatggaaaacgtaaccaaatgttcaaagtttcatgcaaggttaccaataataacggtgaccaaaaccaaaacgttgaaacgaattctgttgatcgaagaaatgttcttcttggcttaggtggtctttatgctataccattagctgcatccgctgctccagctccacctcctgatctctcgtcttgtagtatagccaggattaacgaaaatcaggtggtgccgtacagttgttgcgcgcctaagcctgatgatatggagaaagttccgtattacaagttcccttctatgactaagctccgtgttcgtcagcctgctcatgaagctaatgaggagtatattgccaagtacaatttggcggttagcaagatgagggatcttgataagacacaacctttaaaccctatggtt

SEQ ID NO: 46 - DNA, 425 bp, Artificial
  Mutation introduced by TALE nuclease pair POT32_T01 within a POT32 allele
cctccacttctttatcttccactcctaagccctctcaacttttcatccatggaaaacgtaaccaaatgttcaaagtttcatgcaaggttaccaataataacggtgaccaaaaccaaaacgttgaaacgaattctgttgatcgaagaaatgttcttcttggcttaggtggtctttatggtgtaatgctataccattagctgcatccgctgctccagctccacctcctgatctctcgtcttgtagtatagccaggattaacgaaaatcaggtggtgccgtacagttgttgcgcgcctaagcctgatgatatggagaaagttccgtattacaagttcccttctatgactaagctccgtgttcgtcagcctgctcatgaagctaatgaggagtatattgccaagtacaatttggcggttagcaagatga

SEQ ID NO: 47 - DNA, 452 bp, Artificial
  Mutation introduced by TALE nuclease pair POT32_T01 within a POT32 allele
  misc_feature (181); (185); (196): n is a or c or t or g
cctccacttctttatcttccactcctaagcccctctcaacttttcatccatggaaaacgtaaccaaatgttcaaagtttcatgcaaggttatcaataataacggtgaccaaaacgttgaaacgaattctgttgatcgaagaaatgttcttcttggcttaggtggtctttatgtatgctatnctanactgctcatcngctccaactccacctcctgatctctcgtcttgtagtatagccaggattaacgaaaatcaggtggtgccgtacagttgttgcgcgcctaagcctgatgatatggagaaagttccgtattacaagttcccttctatgactaagctccgtgttcgtcagcctgctcatgaagctaatgaggagtatattgccaagtacaatctggcgattagtcgaatgagagatcttgataagacacaacctttaaaccctattggtt

SEQ ID NO: 48 - DNA, 466 bp, Artificial
  Mutation introduced by TALE nuclease pair POT32_T01 within a POT32 allele
cctccacttctttaacttccactcctaaaccctctcaacttttcatccatggaaaacgtaaccaaatgttcaaagtttcatgcaaggttaccaataataacggtgaccaaaaccaaaacgttgaaacgaattctgttgatcgaagaaatgttcttcttggcttaggtggtctttatggtgttaatgctataccattagctgcatccgctactccatctccacctcctgatctctcgtcttgtagtatagccaggattaacgaaactcatgtggtgccgtacagttgttgcgcgcctaagcctgatgatatggagaaagttccgtattacaagttcccttctatgactaagctccgtgttcgtcagcctgctcatgaagctaatgaggagtatattgccaagtacaatttggcggttagcaagatgaggggatcttgataagacacaacctttaaaccctattggtt

SEQ ID NO: 49 - DNA, 459 bp, Artificial
  Mutation introduced by TALE nuclease pair POT32_T01 within a POT32 allele
cctccacttctttatcttccactcctaagccctctcaacttttcatccatggaaaacgtaaccaaatgttcaaagtttcatgcaaggttaccaataataacggtgaccaaaaccaaaacgttgaaacaaattctgttgatcgaagaaatgttcttcttggcttaggtggtctttataatgctataccattagctgcatccgctgctccagctccacctcctgatctctcgtcttgtagtatagccaggattaacgaaaatcaggtggtgccgtacagttgttgcgcgcctaagcctgatgatatggagaaagttccgtattacaagttcccttctatgactaagctccgtgttcgtcagcctgctcatgaagctaatgaggagtatattgccaagtacaatctggcgattagtcgaatgaaagatcttgataagacacaacctttaaaccctattggtt

SEQ ID NO: 50 - DNA, 438 bp, Artificial
  Mutation introduced by TALE nuclease pair POT32_T01 within a POT32 allele
cctccacttctttatcttccactcctaagccctctcaacttttcatccatggaaaacgtaaccaaatgttcaaagtttcatgcaaggttatcaataataacggtgaccaaaacgttgaaacgaattctgttgatcgaagaaatgttcttcttggcttaggtggtctttatggtttagctgcatccgctgctccaactccacctcctgatctctcgtcttgtagtatagccaggattaacgaaaatcaggtggtgccgtacagttgttgcgcgcctaagcctgatgatatggagaaagttccgtattacaagttcccttctatgactaagctccgtgttcgtcagcctgctcatgaagctaatgaggagtatattgccaagtacaatttggcggttagcaagatgagggatcttgataagacacaacctttaaacccta

SEQ ID NO: 51 - DNA, 455 bp, Artificial
  Mutation introduced by TALE nuclease pair POT32_T01 within a POT32 allele
cctccacttctttatcttccactcctaagccctctcaacttttcctccatggaaaacgtaacaaaacgttcaaagtttcatgcaaggttaccaataataacggtgaccaaaaccaaaacgttgaaacgaattctgttgatcgaagaaatgttcttcttggcttaggtggtcttatgctataccattagctgcatccgctactccatctccacctcctgatctctcgtcttgtagtatagccaggattaacgaaactcatgtggtgccgtacagttgttgcgcgcctaagcctgatgatatggagaaagttccgtattacaagttcccttctatgactaagctccgtgttcgtcagcctgctcatgaagctaatgaggagtatattgccaagtacaatttggcggttagcaagatgagggatcttgataagacacaacctttaaaccctattggtt

SEQ ID NO: 52 - DNA, 458 bp, Artificial
  Mutation introduced by TALE nuclease pair POT32_T01 within a POT32 allele
cctccacttctttaacttccactcctaagccctctcaacttttcatccatggaaaacgtaaccaaatgttcaaagtttcatgcaaggttaccaataataacggtgaccaaaaccaaaacgttgaaacgaattctgttgatcgaagaaatgttcttcttggcttaggtggtctttatggtgctatacattagctgcatccgctgctccagctccacctcctgatctctcgtcttgtagtatagccaggattaacgaaaatcaggtggtgccgtacagttgttgcgcgcctaagcctgatgatatggagaaagttccgtattacaagttcccttctatgactaagctccgtgttcgtcagcctgctcatgaagctaatgaggagtatattgccaagtacaatctggcgattagtcgaatgaaagatcttgataagacacaacctttaaaccctattggtt

SEQ ID NO: 53 - DNA, 448 bp, Artificial
  Mutation introduced by TALE nuclease pair POT32_T01 within a POT32 allele
cctccacttctttaacttccactcctaagcccctctcaacttttcatccatggaaaacgtaaccaaatgttcaaagtttcatgcaaggttatcaataataacggtgaccaaaacgttgaaacgaattctgttgatcgaagaaatgttcttcttggcttaggtggtctttatggtgtatactagctgctcatctgctccagtccacctcctgatctctcgtcttgtagtatagccaggattaacgaaaatcaggtggtgccgtacagttgttgcgcgcctaagcctgatgatatggagaaagttccgtattacaagttcccttctatgactaagctccgtgttcgtcagcctgctcatgaagctaatgaggagtatattgccaagtacaatctggcgattagtcgaatgaaagatcttgataagacacaacctttaaaccctattggtt

SEQ ID NO: 54 - DNA, 406 bp, Artificial
  Mutation introduced by TALE nuclease pair POT32_T01 within a POT32 allele
  misc_feature (327): n is a or c or t or g
cctccacttctttaacttccactcctaaacccctctcaacttttcatccatggaaaacgtaaccaaatgttcaaagtttcatgcaaggttaccaataataacggtgaccaaaaccaaaacgttgaaacgaattctgttgatcgaagaaatgttcttcttggcttaggtggttagctgcatccgctactccatctccacctcctgatctctcgtcttgtagtatagccaggattaacgaaactcatgtggtgccgtacagttgttgcgcgcctaagcctgatgatatggagaaagttccgtattacaagttcccttctatgactaagntccgtgttcgtcagcctgctcatgaagctaatgaggagtatattgccaagtacaatttggcggttagcaagatgaggga

SEQ ID NO: 55 - DNA, 457 bp, Artificial
  Mutation introduced by TALE nuclease pair POT32_T01 within a POT32 allele
cctccacttctttatcttccactcctaagcccctctcaacttttcatccatggaaaacgtaaccaaatgttcaaagtttcatgcaaggttatcaataataacggtgaccaaaacgttgaaacgaattctgttgatcgaagaaatgttcttcttggcttaggtggtctttatggtaatgctataccattagctgcatccgctgctccagctccacctcctgatctctcgtcttgtagtatagccaggattaacgaaaatcaggtggtgccgtacagttgttgcgcgcctaagcctgatgatatggagaaagttccgtattacaagttcccttctatgactaagctccgtgttcgtcagcctgctcatgaagctaatgaggagtatattgccaagtacaatctggcgattagtcgaatgaaagatcttgataagacacaacctttaaaccctattggtt

SEQ ID NO: 56 - DNA, 455 bp, Artificial
  Mutation introduced by TALE nuclease pair POT32_T01 within a POT32 allele
cctccacttctttaacttccactcctaagccctctcaacttttcatccatggaaaacgtaaccaaatgttcaaagtttcatgcaaggttaccaataataacggtgaccaaaaccaaaacgttgaaacgaattctgttgatcgaagaaatgttcttcttggcttaggtggtcttaatgctataccattagctgcatccgctgctccagctccacctcctgatctctcgtcttgtagtatagccaggattaacgaaaatcaggtggtgccgtacagttgttgcgcgcctaagcctgatgatatggagaaagttccgtattacaagttcccttctatgactaagctccgtgttcgtcagcctgctcatgaagctaatgaggagtatattgccaagtacaatctggcgattagtcgaatgaaagatcttgataagacacaacctttaaacctattggtt

SEQ ID NO: 57 - DNA, 451 bp, Artificial
  Mutation introduced by TALE nuclease pair POT32_T01 within a POT32 allele
cctccacttctttatcttccactcctaagcccctctcaacttttcatccatggaaaacgtaaccaaatgttcaaagtttcatgcaaggttatcaataataacggtgaccaaaacgttgaaacgaattctgttgatcgaagaaatgttcttcttggcttaggtggtctttatggtatagcattagctgcatccgctgctccaactccacctcctgatctctcgtcttgtagtatagccaggattaacgaaaatcaggtggtgccgtacagttgttgcgcgcctaagcctgatgatatggagaaagttccgtattacaagttcccttctatgactaagctccgtgttcgtcagcctgctcatgaagctaatgaggagtatattgccaagtacaatctggcgattagtcgaatgagagatcttgataagacacaacctttaaaccctattggtt

SEQ ID NO: 58 - DNA, 458 bp, Artificial
  Mutation introduced by TALE nuclease pair POT32_T01 within a POT32 allele
cctccacttctttatcttccactcctaagcccctctcaacttttcatccatggaaaacgtaaccaaatgttcaaagtttcatgcaaggttatcaataataacggtgaccaaaacgttgaaacgaattctgttgatcgaagaaatgttcttcttggcttaggtggtctttatggttaatgctataccattagctgcatccgctgctccaactccacctcctgatctctcgtcttgtagtatagccaggattaacgaaaatcaggtggtgccgtacagttgttgcgcgcctaagcctgatgatatggagaaagttccgtattacaagttcccttctatgactaagctccgtgttcgtcagcctgctcatgaagctaatgaggagtatattgccaagtacaatctggcgattagtcgaatgagagatcttgataagacacaacctttaaaccctattggtt

SEQ ID NO: 59 - DNA, 419 bp, Artificial
  Mutation introduced by TALE nuclease pair POT32_T01 within a POT32 allele
cctccacttctttaacttccactcctaagccctctcaacttttcatccatggaaaacgtaaccaaatgttcaaagtttcatgcaaggttaccaataataacggtgaccaaaaccaaaacgttgaaacgaattctgttgatcgaagaaatgttcttcttggcttaggtggtctttatggtgctataccattagctgcatccgctgctccagctccacctcctgatctctcgtcttgtagtatagccaggattaacgaaaatcaggtggtgccgtacagttgttgcgcgcctaagcctgatgatatggagaaagttccgtattacaagttcccttctatgactaagctccgtgttcgtcagcctgctcatgaagctaatgaggagtatattgccaagtacaatttggcggttagcaagatg

SEQ ID NO: 60 - DNA, 456 bp, Artificial
  Mutation introduced by TALE nuclease pair POT32_T01 within a POT32 allele
cctccacttctttaacttccactcctaaaccctctcaacttttcatccatggaaaacgtaaccaaatgttcaaagtttcatgcaaggttaccaataataacggtgaccaaaaccaaaacgttgaaacaaattctgttgatcgaagaaatgttcttcttggcttaggtggtctttatgctataccattagctgcatccgctgctccaactccacctcctgatctctcgtcttgtagtatagccaggattaacgaaaatcaggtggtgccgtacagttgttgcgcgcctaagcctgatgatatggagaaagttccgtattacaagttcccttctatgactaagctccgtgttcgtcagcctgctcatgaagctaatgaggagtatattgccaagtacaatctggcgattagtcgaatgagagatcttgataagacacaacctttaaaccctattggtt

SEQ ID NO: 61 - DNA, 460 bp, Artificial
  Mutation introduced by TALE nuclease pair POT32_T01 within a POT32 allele
cctccacttctttaacttccactcctaagcccctctcaacttttcatccatggaaaacgtaaccaaatgttcaaagtttcatgcaaggttaccaataataacggtgaccaaaaccaaaacgttgaaacgaattctgttgatcgaagaaatgttcttcttggcttaggtggtctttatggtgctataccattagctgcatccgctgctccagctccacctcctgatctctcgtcttgtagtatagccaggattaacgaaaatcaggtggtgccgtacagttgttgcgcgcctaagcctgatgatatggagaaagttccgtattacaagttcccttctatgactaagctccgtgttcgtcagcctgctcatgaagctaatgaggagtatattgccaagtacaatctggcgattagtcgaatgaaagatcttgataagacacaacctttaaaccctattggtt

SEQ ID NO: 62 - DNA, 454 bp, Artificial
  Mutation introduced by TALE nuclease pair POT32_T01 within a POT32 allele
cctccacttctttatcttccactcctaagcccctctcaacttttcatccatggaaaacgtaaccaaatgttcaaagtttcatgcaaggttatcaataataagcggctgaaccaaaacgttgaaacgaattctgttgatcgaagaaatgttcttcttggcttaggtggtctttatggtatagcattagctgcatccgctgctccaactccacctcctgatctctcgtcttgtagtatagccaggattaacgaaaatcaggtggtgccgtacagttgttgcgcgcctaagcctgatgatatggagaaagttccgtattacaagttcccttctatgactaagctccgtgttcgtcagcctgctcatgaagctaatgaggagtatattgccaagtacaatctggcgattagtcgaatgagagatcttgataagacacaacctttaaaccctattggtt

SEQ ID NO: 63 - DNA, 457 bp, Artificial
  Mutation introduced by TALE nuclease pair POT32_T01 within a POT32 allele
cctccacttctttatcttccactcctaagcccctctcaacttttcatccatggaaaacgtaaccaaatgttcaaagtttcatgcaaggttatcaataataacggtgaccaaaacgttgaaacgaattctgttgatcgaagaaatgttcttcttggcttaggtggtctttatggtaatgctataccattagctgcatccgctgctccaactccacctcctgatctctcgtcttgtagtatagccaggattaacgaaaatcaggtggtgccgtacagttgttgcgcgcctaagcctgatgatatggagaaagttccgtattacaagttcccttctatgactaagctccgtgttcgtcagcctgctcatgaagctaatgaggagtatattgccaagtacaatctggcgattagtcgaatgagagatcttgataagacacaacctttaaaccctattggtt

SEQ ID NO: 64 - DNA, 453 bp, Artificial
  Mutation introduced by TALE nuclease pair POT32_T01 within a POT32 allele
cctccacttctttatcttccactcctaagccctctcaacttttcatccatggaaaacgtaaccaaatgttcaaagtttcatgcaaggttaccaataataacggtgaccaaaaccaaaacgttgaaacaaattctgttgatcgaagaaatgttcttcttggcttaggtggtctttatggaatgctataccattagctgcatccgctactccatctccacctcctgatctctcgtcttgtagtatagccaggattaacgaaactcatgtggtgccgtacagttgttgcgcgcctaagcctgatgatatggagaaagttccgtattacaagttcccttctatgactaagctccgtgttcgtcagcctgctcatgaagctaatgaggagtatattgccaagtacaatttggcggttagcaagatgagggatcttgataagacacaacctttaaaccc

SEQ ID NO: 65 - DNA, 456 bp, Artificial
  Mutation introduced by TALE nuclease pair POT32_T01 within a POT32 allele
cctccacttctttacttccactcctaagcccctctcaacttttcatccatggaaaacgtaaccaaatgttcaaagtttcatgcaaggttatcaataataacggtgaccaaaacgttgaaacgaattctgttgatcgaagaaatgttcttcttggcttaggtggtctttatggtaatgctataccattagctgcatccgctgctccaactccacctcctgatctctcgtcttgtagtatagccaggattaacgaaaatcaggtggtgccgtacagttgttgcgcgcctaagcctgatgatatggagaaagttccgtattacaagttcccttctatgactaagctccgtgttcgtcagcctgctcatgaagctaatgaggagtatattgccaagtacaatctggcgattagtcgaatgagagatcttgataagacacaacctttaaaccctattggtt

SEQ ID NO: 66 - DNA, 434 bp, Artificial
  Mutation introduced by TALE nuclease pair POT32_T01 within a POT32 allele
cctccacttctttaacttccactcctaaaccctctcaacttttcatccatggaaaacgtaaccaaatgttcaaagtttcatgcaaggttaccaataataacggtgaccaaaaccaaaacgttgaaacgaattctgttgatcgaagaaatgttcttcttggcttaggtggttagctgcatccgctactccatctccacctcctgatctctcgtcttgtagtatagccaggattaacgaaactcatgtggtgccgtacagttgttgcgcgcctaagcctgatgatatggagaaagttccgtattacaagttcccttctatgactaagctccgtgttcgtcagcctgctcatgaagctaatgaggagtatattgccaagtacaatttggcggttagcaagatgagggatcttgataagacacaacctttaaacccta

SEQ ID NO: 67 - DNA, 464 bp, Artificial
  Mutation introduced by TALE nuclease pair POT32_T01 within a POT32 allele
cctccacttctttatcttccactcctaagccctctcaacttttcatccatggaaaacgtaaccaaatgttcaaagtttcatgcaaggttaccaataataacggtgaccaaaaccaaaacgttgaaacgaattctgttgatcgaagaaatgttcttcttggcttaggtggtctttatggtgtaatgctataccattagctgcatccgctgctccagctccacctcctgatctctcgtcttgtagtatagccaggattaacgaaaatcaggtggtgccgtacagttgttgcgcgcctaagcctgatgatatggagaaagttccgtattacaagttcccttctatgactaagctccgtgttcgtcagcctgctcatgaagctaatgaggagtatattgccaagtacaatttggcggttagcaagatgagggatcttgataagacacaacctttaaaccctattggtt

SEQ ID NO: 68 - DNA, 438 bp, Artificial
  Mutation introduced by TALE nuclease pair POT32_T01 within a POT32 allele
cctccacttctttatcttccactcctaagccctctcaacttttcctccatggaaaacgtaacaaaacgttcaaagtttcatgcaaggttaccaataataacggtgaccaaaaccaaaacgttgaaacgaattctgttgatcgaagaaatgttcttcttggcttaggtggtcttatgctataccattagctgcatccgctactccatctccacctcctgatctctcgtcttgtagtatagccaggattaacgaaactcatgtggtgccgtacagttgttgcgcgcctaagcctgatgatatggagaaagttccgtattacaagttcccttctatgactaagctccgtgttcgtcagcctgctcatgaagctaatgaggagtatattgccaagtacaatttggcggttagcaagatgagggatcttgataagacacaacc

SEQ ID NO: 69 - DNA, 454 bp, Artificial
  Mutation introduced by TALE nuclease pair POT32_T01 within a POT32 allele
cctccacttctttatcttccactcctaagcccctctcaacttttcatccatggaaaacgtaaccaaatgttcaaagtttcatgcaaggttatcaataataacggtgaccaaaacgttgaaacgaattctgttgatcgaagaaatgttcttcttggcttaggtggtctttatggtgctataccattagctgcatccgctgctccaactccacctcctgatctctcgtcttgtagtatagccaggattaacgaaaatcaggtggtgccgtacagttgttgcgcgcctaagcctgatgatatggagaaagttccgtattacaagttcccttctatgactaagctccgtgttcgtcagcctgctcatgaagctaatgaggagtatattgccaagtacaatctggcgattagtcgaatgagagatcttgataagacacaacctttaaaccctattggtt

SEQ ID NO: 70 - DNA, 443 bp, Artificial
  Mutation introduced by TALE nuclease pair POT32_T01 within a POT32 allele
cctccacttctttaacttccactcctaaaccctctcaacttttcatccatggaaaacgtaaccaaatgttcaaagtttcatgcaaggttaccaataataacggtgaccaaaaccaaaacgttgaaacgaattctgttgatcgaagaaatgttcttcttggcttaggtggtctttatgaatgctataccattagctgcatccgctgctccagctccacctcctgatctctcgtcttgtagtatagccaggattaacgaaaatcaggtggtgccgtacagttgttgcgcgcctaagcctgatgatatggagaaagttccgtattacaagttcccttctatgactaagctccgtgttcgtcagcctgctcatgaagctaatgaggagtatattgccaagtacaatttggcggttagcaagatgagggatcttgataagacacaacc

SEQ ID NO: 71 - DNA, 414 bp, Artificial
  Mutation introduced by TALE nuclease pair POT32_T01 within a POT32 allele
cctccacttctttaacttccactcctaaacccctctcaacttttcatccatggaaaacgtaaccaaatgttcaaagtttcatgcaaggttaccaataataacggtgaccaaaaccaaaacgttgaaacaaattctgttgatcgaagaaatgttcttcttggcttaggtggtctttctaagtgcttataccattagcttgcatccgatctactccatcgtccacctcctgatctctcgtcttgtagtatagccaggattaacgaaaactcagtggtgccgtacagttgttgcgcgcctaagcctgatgatatggagaaagttccgtattacaagttcccttctatgactaagctccgtgttcgtcagcctgctcatgaagctaatgaggagtatattgccaagtacaattgcgtt

SEQ ID NO: 72 - DNA, 452 bp, Artificial
  Mutation introduced by TALE nuclease pair POT32_T01 within a POT32 allele
ttcctccacttctttacttccactcctaagcccctctcaacttttcatccatggaaaacgtaaccaaatgttcaaagtttcatgcaaggttatcaataatacggtgaccaaaacgttgaaacgaattctgttgatcgaagaaatgttcttcttggcttaggtggtctttatggtatagcattagctgcatccgctgctccaactccacctcctgatctctcgtcttgtagtatagccaggattaacgaaaatcaggtggtgccgtacagttgttgcgcgcctaagcctgatgatatggagaaagttccgtattacaagttcccttctatgactaagctccgtgttcgtcagcctgctcatgaagctaatgagggagtatattgccaagtacaatctggcgattagtcgaatgagagatcttgataagacacaacctttaaaccctattggtt

SEQ ID NO: 73 - DNA, 456 bp, Artificial
  Mutation introduced by TALE nuclease pair POT32_T01 within a POT32 allele
cctccacttctttatcttccactcctaagcccctctcaacttttcatccatggaaaacgtaaccaaatgttcaaagtttcatgcaaggttatcaataataacggtgaccaaaacgttgaaacgaattctgttgatcgaagaaatgttcttcttggcttaggtggtctttatggtatgctataccattagctgcatccgctgctccaactccacctcctgatctctcgtcttgtagtatagccaggattaacgaaaatcaggtggtgccgtacagttgttgcgcgcctaagcctgatgatatggagaaagttccgtattacaagttcccttctatgactaagctccgtgttcgtcagcctgctcatgaagctaatgaggagtatattgccaagtacaatctggcgattagtcgaatgagagatcttgataagacacaacctttaaaccctattggtt

SEQ ID NO: 74 - DNA, 402 bp, Artificial
  Mutation introduced by TALE nuclease pair POT32_T01 within a POT32 allele
cctccacttctttaacttccactcctaaacccctctcaacttttcatccatggaaaacgtaaccaaatgttcaaagtttcatgcaaggttaccaataataacggtgaccaaaaccaaaacgttgaaacgaattctgttgatcgaagaaatgttcttcttggcttaggtggttagctgcatccgctactccatctccacctcctgatctctcgtcttgtagtatagccaggattaacgaaactcatgtggtgccgtacagttgttgcgcgcctaagcctgatgatatggagaaagttccgtattacaagttcccttctatgactaagctccgtgttcgtcagcctgctcatgaagctaatgaggagtatattgccaagtacaatttggcggttagcaagatga

SEQ ID NO: 75 - DNA, 459 bp, Artificial
  Mutation introduced by TALE nuclease pair POT32_T01 within a POT32 allele
cctccacttctttatcttccactcctaagccctctcaacttttcatccatggaaaacgtaaccaaatgttcaaagtttcatgcaaggttaccaataataacggtgaccaaaaccaaaacgttgaaacgaaattctgttgatcgaagaaatgttcttcttggcttaggtggtctttatggtgtaatgctataccattagctgcatccgctgctccagctccacctcctgatctctcgtcttgtagtatagcccaggattaaacgaaaatcaggtgggtgcccgtacagttgttgcgcgcctaagcctgatgatatggagaaagttccgtattacaagttcccttctatgactaagctccgtgttcgtcagcctgctcatgaagctaatgaggagtatattgccaagtacaatttggcggttagcaagatgagggatcttgataagacacaaccttttaaa

SEQ ID NO: 76 - DNA, 460 bp, Artificial
  Mutation introduced by TALE nuclease pair POT32_T01 within a POT32 allele
cctccacttctttaacttccactcctaaaccctctcaacttttcatccatggaaaacgtaaccaaatgttcaaagtttcatgcaaggttaccaataataacggtgaccaaaaccaaaacgttgaaacgaattctgttgatcgaagaaatgttcttcttggcttaggtggtctttatgaatgctataccattagctgcatccgctgctccagctccacctcctgatctctcgtcttgtagtatagccaggattaacgaaaatcaggtggtgccgtacagttgttgcgcgcctaagcctgatgatatggagaaagttccgtattacaagttcccttctatgactaagctccgtgttcgtcagcctgctcatgaagctaatgaggagtatattgccaagtacaatttggcggttagcaagatgagggatcttgataagacacaacctttaaaccctattggtt

SEQ ID NO: 77 - DNA, 416 bp, Artificial
  Mutation introduced by TALE nuclease pair POT32_T01 within a POT32 allele
cctccacttctttatcttccactcctaagccctctcaacttttcctccatggaaaacgtaacaaaacgttcaaagtttcatgcaaggttaccaataataacggtgaccaaaaccaaaacgttgaaacgaattctgttgatcgaagaaatgttcttcttggcttaggtggtcttatgctataccattagctgcatccgctactccatctccacctcctgatctctcgtcttgtagtatagccaggattaacgaaactcatgtggtgccgtacagttgttgcgcgcctaagcctgatgatatggagaaagttccgtattacaagttcccttctatgactaagctccgtgttcgtcagcctgctcatgaagctaatgaggagtatattgccaagtacaatttggcggttagcaagatga

SEQ ID NO: 78 - DNA, 447 bp, Artificial
  Mutation introduced by TALE nuclease pair POT32_T01 within a POT32 allele
cctccacttctttatcttccactcctaagccctctcaacttttcatccatggaaaacgtaaccaaatgttcaaagtttcatgcaaggttatcaataataacggtgaccaaaacgttgaaacgaattctgttgatcgaagaaatgttcttcttggcttaggtggtctttatggaccattagctgcatccgctgctccaactccacctcctgatctctcgtcttgtagtatagccaggattaacgaaaatcaggtggtgccgtacagttgttgcgcgcctaagcctgatgatatggagaaagttccgtattacaagttcccttctatgactaagctccgtgttcgtcagcctgctcatgaagctaatgaggagtatattgccaagtacaatctggcgattagtcgaatgagagatcttgataagacacaacctttaaaccctattggtt

SEQ ID NO: 79 - DNA, 417 bp, Artificial
  Mutation introduced by TALE nuclease pair POT32_T01 within a POT32 allele
cctccacttctttatcttccactcctaagccctctcaacttttcatccatggaaaacgtaaccaaatgttcaaagtttcatgcaaggttaccaataataacggtgaccaaaaccaaaacgttgaaacgaattctgttgatcgaagaaatgttcttcttggcttaggtggtctttatgctataccattagctgcatccgctgctccagctccacctcctgatctctcgtcttgtagtatagccaggattaacgaaaatcaggtggtgccgtacagttgttgcgcgcctaagcctgatgatatggagaaagttccgtattacaagttcccttctatgactaagctccgtgttcgtcagcctgctcatgaagctaatgaggagtatattgccaagtacaatttggcggttagcaagatga

SEQ ID NO: 80 - DNA, 448 bp, Artificial
  Mutation introduced by TALE nuclease pair POT32_T01 within a POT32 allele
cctccacttctttatcttccactcctaagccctctcaacttttcatccatggaaaacgtaaccaaatgttcaaagtttcatgcaaggttatcaataataacggtgaccaaaacgttgaaacgaattctgttgatcgaagaaatgttcttcttggcttaggtggtctttatggaccattagctgcatccgctgctccaactccacctcctgatctctcgtcttgtagtatagccaggattaacgaaaattcaggtggtgccgtacagttgttgcgcgcctaagcctgatgatatggagaaagttccgtattacaagttcccttctatgactaagctccgtgttcgtcagcctgctcatgaagctaatgaggagtatattgccaagtacaatctggcgattagtcgaatgagagatcttgataagacacaacctttaaaccctattggtt

SEQ ID NO: 81 - DNA, 440 bp, Artificial
  Mutation introduced by TALE nuclease pair POT32_T01 within a POT32 allele
cctccacttctttaacttccactcctaagccctctcaacttttcatccatggaaaacgtaaccaaatgttcaaagtttcatgcaaggttaccaataataacggtgaccaaaaccaaaacgttgaaacgaattctgttgatcgaagaaatgttcttcttggcttaggtggtctttatggtaatgctataccattagctgcatccgctgctccagctccacctcctgatctctcgtcttgtagtatagccaggattaacgaaaatcaggtggtgccgtacagttgttgcgcgcctaagcctgatgatatggagaaagttccgtattacaagttcccttctatgactaagctccgtgttcgtcagcctgctcatgaagctaatgaggagtatattgccaagtacaatctggcgattagtcgaatgaaagatcttgataagaca

SEQ ID NO: 82 - DNA, 461 bp, Artificial
  Mutation introduced by TALE nuclease pair POT32_T01 within a POT32 allele
cctccacttctttaacttccactcctaaaccctctcaacttttcatccatggaaaacgtaaccaaatgttcaaagtttcatgcaaggttaccaataataacggtgaccaaaaccaaaacgttgaaacgaattctgttgatcgaagaaatgttcttcttggcttaggtggtctttatgaatgctataccattagctgcatccgctgctccagctccacctcctgatctctcgtcttgtagtatagccaggattaacgaaaatcaggtggtgccgtacagttgttgcgcgcctaagcctgatgatatggagaaagttccgtattacaagttcccttctatgactaagctccgtgttcgtcagcctgctcatgaagctaatgaggagtatattgccaagtacaatttggcggttagcaagatgaggggatcttgataagacacaacctttaaaccctattggtt

SEQ ID NO: 83 - DNA, 464 bp, Artificial
  Mutation introduced by TALE nuclease pair POT32_T01 within a POT32 allele
cctccacttctttaacttccactcctaagccctctcaacttttcatccatggaaaacgtaaccaaatgttcaaagtttcatgcaaggttaccaataataacggtgaccaaaaccaaaacgttgaaacgaattctgttgatcgaagaaatgttcttcttggcttaggtggtctttatggtgtaatgctataccattagctgcatccgctgctccagctccacctcctgatctctcgtcttgtagtatagccaggattaacgaaaatcaggtggtgccgtacagttgttgcgcgcctaagcctgatgatatggagaaagttccgtattacaagttcccttctatgactaagctccgtgttcgtcagcctgctcatgaagctaatgaggagtatattgccaagtacaatctggcgattagtcgaatgaaagatcttgataagacacaacctttaaaccctattggtt

SEQ ID NO: 84 - DNA, 461 bp, Artificial
  Mutation introduced by TALE nuclease pair POT32_T01 within a POT32 allele
tcctccacttctttaacttccactcctaagcccctctcaacttttcatccatggaaaacgtaaccaaatgttcaaagtttcatgcaaggttaccaataataacggtgaccaaaaccaaaacgttgaaacgaattctgttgatcgaagaaatgttcttcttggcttaggtggtctttatggtgctataccattagctgcatccgctgctccagctccacctcctgatctctcgtcttgtagtatagccaggattaacgaaaatcaggtggtgccgtacagttgttgcgcgcctaagcctgatgatatggagaaagttccgtattacaagttcccttctatgactaagctccgtgttcgtcagcctgctcatgaagctaatgaggagtatattgccaagtacaatctggcgattagtcgaatgaaagatcttgataagacacaacctttaaaccctattggtt

SEQ ID NO: 85 - DNA, 464 bp, Artificial
  Mutation introduced by TALE nuclease pair POT32_T01 within a POT32 allele
cctccacttctttaacttccactcctaaaccctctcaacttttcatccatggaaaacgtaaccaaatgttcaaagtttcatgcatggttaccaataataacggtgaccaaaaccaaaacgttgaaacgaattctgttgatcgaagaaatgttcttcttggcttaggtggtctttatggttgttatactataccattagctgcatccgctactccatctccacctcctgatctctcgtcttgtagtatagccaggattaacgaaactcatgtggtgccgtacagttgttgcgcgcctaagcctgatgatatggagaaagttccgtattacaagttcccttctatgactaagctccgtgttcgtcagcctgctcatgaagctaatgaggagtatattgccaagtacaatctggcgattagtcgaatgaagatcttgataagacacaacctttaaaccctattggtt

SEQ ID NO: 86 - DNA, 454 bp, Artificial
  Mutation introduced by TALE nuclease pair POT32_T01 within a POT32 allele
  misc_feature (377): n is a or c or t or g
ttcctccacttctttacttccactcctaagcccctctcaacttttcatccatggaaaacgtaaccaaatgttcaaagtttcatgcaaggttatcaataataacggtgaaccaaaacgttgaaacgaattctgttgatcgaagaaatgttcttcttggcttaggtggtctttatggtatagacattagctgcatccgctgctccaactccacctcctgatctctcgtcttgtagtatagccaggattaacgaaaatcaggtggtgccgtacagttgttgcgcgcctaagcctgatgatatggagaaagttccgtattacaagttcccttctatgactaagctccgtgttcgtcagcctgctcatgaagctaatgaggngtatattgccaagtacaatctggcgattagtcgaatgagagatcttgataagacacaacctttaaaccctattggtt

SEQ ID NO: 87 - DNA, 417 bp, Artificial
  Mutation introduced by TALE nuclease pair POT32_T01 within a POT32 allele
cctccacttctttatcttccactcctaagcccctctcaacttttcctccatggaaaacgtaacaaaacgttcaaagtttcatgcaaggttaccaataataacggtgaccaaaaccaaaacgttgaaacgaattctgttgatcgaagaaatgttcttcttggcttaggtggtcttatgctataccattagctgcatccgctactccatctccacctcctgatctctcgtcttgtagtatagccaggattaacgaaactcatgtggtgccgtacagttgttgcgcgcctaagcctgatgatatggagaaagttccgtattacaagttcccttctatgactaagctccgtgttcgtcagcctgctcatgaagctaatgaggagtatattgccaagtacaatttggcggttagcaagatga

SEQ ID NO: 88 - DNA, 409 bp, Artificial
  Mutation introduced by TALE nuclease pair POT32_T01 within a POT32 allele
  misc_feature (206): n is a or c or t or g
cctccacttctttatcttccactcctaagcccctctcaacttttcctccatggaaaacgtaacaaaacgttcaaagtttcatgcaaggttaccaataataacggtgaccaaaaccaaaacgttgaaacgaattctgttgatcgaagaaatgttcttcttggcttaggtggtctttatggtactgctacacttagctgcatccgctntccagtccacctcctgatctctcgtcttgtagtatagccaggattaacgaaaatcagtggtgccgtacagttgttgcgcgcctaagcctgatgatatggagaaagttccgtattacaagttcccttctatgactaagctccgtgttcgtcagcctgctcatgaagctaatgaggagtatattgccaagtacaattgcgttgcg

SEQ ID NO: 89 - DNA, 464 bp, Artificial
  Mutation introduced by TALE nuclease pair POT32_T01 within a POT32 allele
cctccacttctttatcttccactcctaagcccctctcaacttttcatccatggaaaacgtaaccaaatgttcaaagtttcatgcaaggttaccaataataacggtgaccaaaaccaaaacgttgaaacgaattctgttgatcgaagaaatgttcttcttggcttaggtggtctttatggtgaatgctataccattagctgcatccgctgctccagctccacctcctgatctctcgtcttgtagtatagccaggattaacgaaaatcaggtggtgccgtacagttgttgcgcgcctaagcctgatgatatggagaaagttccgtattacaagttcccttctatgactaagctccgtgttcgtcagcctgctcatgaagctaatgaggagtatattgccaagtacaatttggcggttagcaagatgagggatcttgataagacacaacctttaaaccctattggtt

SEQ ID NO: 90 - DNA, 440 bp, Artificial
  Mutation introduced by TALE nuclease pair POT32_T01 within a POT32 allele
  misc_feature (107): n is a or c or t or g
cctccacttctttatcttccactcctaagcccctctcaacttttcatccatggaaaacgtaaccaaatgttcaaagtttcatgcaaggttatcaataataacggtgnccaaaacgttgaaacgaattctgttgatcgaagaaatgttcttcttggcttaggtggtctttatggtaatgctataccattagctgcatccgctgctccaactccacctcctgatctctcgtcttgtagtatagccaggattaacgaaaatcaggtggtgccgtacagttgttgcgcgcctaagcctgatgatatggagaaagttccgtattacaagttcccttctatgactaagctccgtgttcgtcagcctgctcatgaagctaatgaggagtatattgccaagtacaatctggcgattagtcgaatgagagatcttgataagacacaacc

SEQ ID NO: 91 - DNA, 460 bp, Artificial
  Mutation introduced by TALE nuclease pair POT32_T01 within a POT32 allele
cctccacttctttaacttccactcctaagccctctcaacttttcatccatggaaaacgtaaccaaatgttcaaagtttcatgcaaggttaccaataataacggtgaccaaaaccaaaacgttgaaacgaattctgttgatcgaagaaatgttcttcttggcttaggtggtctttatggtgctatacccattagctgcatccgctgctccagctccacctcctgatctctcgtcttgtagtatagccaggattaacgaaaatcaggtggtgccgtacagttgttgcgcgcctaagcctgatgatatggagaaagttccgtattacaagttcccttctatgactaagctccgtgttcgtcagcctgctcatgaagctaatgaggagtatattgccaagtacaatctggcgattagtcgaatgaaagatcttgataagacacaacctttaaaccctattggtt

SEQ ID NO: 92 - DNA, 386 bp, Artificial
  Mutation introduced by TALE nuclease pair POT32_T01 within a POT32 allele
cctccacttctttatcttccactcctaggcccccctctcaacttttcatccatggaaaacgtaaccaaatgttcaaagtttcatgcaaggttaccaataataacggtgaccaaaaccaaaacgttgaaacaaattctgttgatcgaagaaatgttcttcttggcttaggtggtctttatggtatgctataccattagctgcatccgctgctccagctccacctcctgatctctcgtcttgtagtatagccaggattaacgaaaatcaggtggtgccgtacagttgttgcgcgcctaagcctgatgatatggagaaagtttccgtattacaagtttcccttctatgactaagctccgtgttcgtcagcctgctcatgaagctaatga

SEQ ID NO: 93 - DNA, 457 bp, Artificial
  Mutation introduced by TALE nuclease pair POT32_T01 within a POT32 allele
cctccacttctttatcttccactcctaagccccctctcaacttttcatccatggaaaacgtaaccaaaatgttcaaagtttcatgcaaggttaccaataataacggtgaccaaaaccaaaacgttgaaacgaattctgttgatcgaagaaatgttcttcttggcttaggtggtctttatggaatgctatacccattagctgcatccgctactccatctccacctcctgatctctcgtcttgtagtatagccaggattaacgaaactcatgtggtgccgtacagttgttgcgcgcctaagcctgatgatatggagaaagttccgtattacaagttcccttctatgactaagctccgtgttcgtcagcctgctcatgaagctaatgaggagtatattgccaagtacaatttggcggttagcaagatgagggatcttgataagacacaacctttaaaccc

SEQ ID NO: 94 - DNA, 423 bp, Artificial
  Mutation introduced by TALE nuclease pair POT32_T01 within a POT32 allele
cctccacttctttaacttccactcctaaaccctctcaacttttcatccatggaaaacgtaaccaaatgttcaaagtttcatgcaaggttaccaataataacggtgaccaaaaccaaaacgttgaaacgaattctgttgatcgaagaaatgttcttcttggcttaggtggtctttatggtaatgctataccattagctgcatccgctactccatctccacctcctgatctctcgtcttgtagtatagccaggattaacgaaactcatgtggtgccgtacagttgttgcgcgcctaagcctgatgatatggagaaagttccgtattacaagttcccttctatgactaagctccgtgttcgtcagcctgctcatgaagctaatgaggagtatattgccaagtacaatttggcggttagcaagatga

SEQ ID NO: 95 - DNA, 453 bp, Artificial
  Mutation introduced by TALE nuclease pair POT32_T01 within a POT32 allele
cctccacttctttatcttccactcctaagcccctctcaacttttcatccatggaaaacgtaaccaaatgttcaaagtttcatgcaaggttaccaataataacggtgaccaaaaccaaaacgttgaaacgaattctgttgatcgaagaaatgttcttcttggcttaggtggtctttatggtgtaatgctataccattagctgcatccgctgctccagctccacctcctgatctctcgtcttgtagtatagccaggattaacgaaaatcaggtggtgccgtacagttgttgcgcgcctaagcctgatgatatggagaaagttccgtattacaagttcccttctatgactaagctccgtgttcgtcagcctgctcatgaagctaatgaggagtatattgccaagtacaatttggcggttagcaagatgaggggatcttgataagacacaacctttt

SEQ ID NO: 96 - DNA, 447 bp, Artificial
  Mutation introduced by TALE nuclease pair POT32_T01 within a POT32 allele
cctccacttctttatcttccactcctaagcccctctcaacttttcatccatggaaaacgtaaccaaatgttcaaagtttcatgcaaggttaccaataataacggtgaccaaaaccaaaacgttgaaacgaattctgttgatcgaagaaatgttcttcttggcttaggtggtctttatggtaatgctataccattagctgcatccgctgctccagctccacctcctgatctctcgtcttgtagtatagccaggattaacgaaaatcaggtggtgccgtacagttgttgcgcgcctaagcctgatgatatggagaaagttccgtattacaagttcccttctatgactaagctccgtgttcgtcagcctgctcatgaagctaatgaggagtatattgccaagtacaatttggcggttagcaagatgaggggatcttgataagacacaacc

SEQ ID NO: 97 - DNA, 542 bp, Artificial
  Mutation introduced by TALE nuclease pair POT32_T01 within a POT32 allele
gcaagcttgtgcaatagtagtagtaccactctcaaaactccttttacttcttcctccacttctttatcttccactcctaagccctctcaacttttcctccatggaaaacgtaacaaaacgttcaaagtttcatgcaaggttaccaataataacggtgaccaaaacgttgaaacgaattctgttgatcgaagaaatgttcttcttggcttaggtggtctttatggtgtgccaggcccacggcttgaccccgccaggagtggtggctaatgctataccattagctgcatccgctactccatctccacctcctgatctctcgtcttgtagtatagccaggattaacgaaactcatgtggtgccgtacagttgttgcgcgcctaagcctgatgatatggagaaagttccgtattacaagttcccttctatgactaagctccgtgttcgtcagcctgctcatgaagctaatgaggagtatattgccaagtacaatttggcggttagcaagatgagggatcttgataagacacaacctttaaacccta

SEQ ID NO: 98 - DNA, 527 bp, Artificial
  Mutation introduced by TALE nuclease pair POT32_T01 within a POT32 allele
gcaagcttgtgcaatagtagtagtaccactctcaaaactccttttacttcttcctccacttctttatcttccactcctaagcccctctcaacttttcctccatggaaaacgtaacaaaacgttcaaagtttcatgcaaggttaccaataataacggcgaccaaaacgttgaaacgaattctgttgatcgaagaaatgttcttcttggcttaggtggtctttatggtgtgccaggcccacggcttgaccccccaggtggtggctaatgctataccattagctgcatccgctactccatctccacctcctgatctctcgtcttgtagtatagccaggattaacgaaactcatgtggtgccgtacagttgttgcgcgcctaagcctgatgatatggagaaagttccgtattacaagttcccttctatgactaagctccgtgttcgtcagcctgctcatgaagctaatgaggagtatattgccaagtacaatttggcggttagcaagatgagggatcttgataagacacaa

SEQ ID NO: 99 - DNA, 494 bp, Artificial
  Mutation introduced by TALE nuclease pair POT32_T01 within a POT32 allele
gcaagcttgtgcaatagtagtagtacatctctcaaaactccttttacttcttcctccacttctttaacttccactcctaagccctctcaacttttcatccatggaaaacgtaaccaaatgttcaaagtttcatgcaaggttatcaataataacggtgaccaaaacgttgaaacgaattctgttgatcgaagaaatgttcttcttggcttaggtggtctttatggtgtcacctcgctgtacgtcacccacgatcagctaatgctataccattagctgcatccgctgctccactccacctcctgatctctcgtcttgtagtatagccaggattaacgaaaatcaggtggtgccgtacagttgttgcgcgcctaagcctgatgatatggagaaagttccgtattacaagttcccttctatgactaagctccgtgttcgtcagctgctcatgaagctaatgaggagtatattgccaagtacaatctggcgattagtcg

SEQ ID NO: 100 - DNA, 539 bp, Artificial
  Mutation introduced by TALE nuclease pair POT32_T01 within a POT32 allele
gcaagcttgtgcaatagtagtagtacatctctcaaaactccttttacttcttcctccacttctttatcttccactcctaagccctctcaacttttcatccatggaaaacgtaaccaaatgttcaaagtttcatgcaaggttaccaataataacggtgaccaaaaccaaaacgttgaaacgaattctgttgatcgaagaaatgttcttcttggcttaggtggtctttatggtgcggcgaccgagttgctcttgcccggctgctaatgctataccattagctgcatccgctgctccagctccacctcctgatctctcgtcttgtagtatagccaggattaacgaaaatcaggtggtgccgtacagttgttgcgcgcctaagcctgatgatatggagaaagttccgtattacaagttcccttctatgactaagctccgtgttcgtcagcctgctcatgaagctaatgaggagtatattgccaagtacaatttggcggttagcaagatgagggatcttgataagacacaacctttaaacccta

SEQ ID NO: 101 - DNA, 524 bp, Artificial
  Mutation introduced by TALE nuclease pair POT32_T01 within a POT32 allele
gcaagcttgtgcaatagtagtagtacatctctcaaaactccttttacttcttcctccacttctttaacttccactcctaagcccctctcaacttttcatccatggaaaacgtaaccaaatgttcaaagtttcatgcaaggttatcaataataacggtgaccaaaacgttgaaacgaattctgttgatcgaagaaatgttcttcttggcttaggtggtctttatggtgtcacctcgctgtacgtcacccacgatcagctaatgctataccattagctgcatccgctgctccaactccacctcctgatctctcgtcttgtagtatagccaggattaacgaaaatcaggtggtgccgtacagttgttgcgcgcctaagcctgatgatatggagaaagttccgtattacaagttcccttctatgactaagctccgtgttcgtcagcctgctcatgaagctaatgaggagtatattgccaagtacaatctggcgattagtcgaatgagagatcttgataagacacaacc

SEQ ID NO: 102 - DNA, 547 bp, Artificial
  Mutation introduced by TALE nuclease pair POT32_T01 within a POT32 allele
gcaagcttgtgcaatagtagtagtacatctctcaaaactccttttacttcttcctccacttctttaacttccactcctaagcccctctcaacttttcatccatggaaaacgtaaccaaatgttcaaagtttcatgcatggttaccaataataacggtgaccaaaaccaaaacgttgaaacgaattctgttgatcgaagaaatgttcttcttggcttaggtggtctttatggtgttgctgtgccaggcccacggcttgacccccgttcgctaatgctataccattagctgcatccgctactccatctccacctcctgatctctcgtcttgtagtatagccaggattaacgaaactcatgtggtgccgtacagttgttgcgcgcctaagcctgatgatatggagaaagttccgtattacaagttcccttctatgactaagctccgtgttcgtcagcctgctcatgaagctaatgaggagtatattgccaagtacaatttggcggttagcaagatgagggatcttgataagacacaacctttaaacccta

SEQ ID NO: 103 - DNA, 540 bp, Artificial
  Mutation introduced by TALE nuclease pair POT32_T01 within a POT32 allele
gcaagcttgtgcaatagtagtagtacatctctcaaaactccttttacttcttcctccacttctttatcttccactcctaagcccctctcaacttttcatccatggaaaacgtaaccaaatgttcaaagtttcatgcaaggttaccaataataacggtgaccaaaaccaaaacgttgaaacgaattctgttgatcgaagaaatgttcttcttggcttaggtggtctttatggtgcggcgaccgagttgctcttgcccggctgctaatgctataccattagctgcatccgctgctccagctccacctcctgatctctcgtcttgtagtatagccaggattaacgaaaatcaggtggtgccgtacagttgttgcgcgcctaagcctgatgatatggagaaagttccgtattacaagttcccttctatgactaagctccgtgttcgtcagcctgctcatgaagctaatgaggagtatattgccaagtacaatttggcggttagcaagatgagggatcttgataagacacaacctttaaacccta

SEQ ID NO: 104 - DNA, 516 bp, Artificial
  Mutation introduced by TALE nuclease pair POT32_T01 within a POT32 allele
gcaagcttgtgcaatagttgtagtacatctctcaaaactccttttacttcttcctccacttctttatcttccactcctaagccctctcaacttttcatccatggaaaacgtaaccaaatgttcaaagtttcatgcaaggttatcaataataacggtgaccaaaacgttgaaacgaattctgttgatcgaagaaatgttcttcttggcttaggtggtctttatggtgttgtctccagcgcctgcttgccaccgccatcgctaatgctataccattagctgcatccgctgctccaactccacctcctgatctctcgtcttgtagtatagccaggattaacgaaaatcagggtggtgccgtacagttgttgcgcgcctaagcctgatgatatggagaaagttccgtattacaagttcccttctatgactaagctccgtgttcgtcagcctgctcatgaagctaatgaggagtatattgccaagtacaatctggcgattagtcgaatgagagatcttgat

SEQ ID NO: 105 - DNA, 513 bp, Artificial
  Mutation introduced by TALE nuclease pair POT32_T01 within a POT32 allele
gcaagcttgtgcaatagtagtagtacatctctcaaaactccttttacttcttcctccacttctttaacttccactcctaagcccctctcaacttttcatccatggaaaacgtaaccaaatgttcaaagtttcatgcaaggttatcaataataacggtgaccaaaacgttgaaacgaattctgttgatcgaagaaatgttcttcttggcttaggtggtctttatggtgtcacctcgctgtacgtcacccacgatcagctaatgctataccattagctgcatccgctgctccaactccacctcctgatctctcgtcttgtagtatagccaggattaacgaaaatcaggtggtgccgtacagttgttgcgcgcctaagcctgatgatatggagaaagttccgtattacaagttcccttctatgactaagctccgtgttcgtcagcctgctcatgaagctaatgaggagtatattgccaagtacaatctggcgattagtcgaatgagagatcttgat

SEQ ID NO: 106 - DNA, 575 bp, Artificial
  Mutation introduced by TALE nuclease pair POT32_T01 within a POT32 allele
gcaagcttgtgcaatagtagtagtacatctctcaaaactccttttacttcttcctccacttctttatcttccactcctaagccctctcaacttttcatccatggaaaacgtaaccaaatgttcaaagtttcatgcaaggttaccaataataacggtgaccaaaaccaaaacgttgaaacaaattctgttgatcgaagaaatgttcttcttggcttaggtggtctttatggtgtttccgaaatagtgtaaaagaagtgcttcgaatcattgctatttgactcggacctgttctaaaaagtcgaggtatttcgaattgtttgttgactgctaatgctataccattagctgcatccgctgctccagctccacctcctgatctctcgtcttgtagtatagccaggattaacgaaaatcaggtggtgccgtacagttgttgcgcgcctaagcctgatgatatggagaaagttccgtattacaagttcccttctatgactaagctccgtgttcgtcagcctgctcatgaagctaatgaggagtatattgccaagtacaatctggcgattagtcgaatgaaa

SEQ ID NO: 107 - DNA, 531 bp, Artificial
  Mutation introduced by TALE nuclease pair POT32_T01 within a POT32 allele
gcaagcttgtgcaatagtagtagtacatctctcaaaactccttttacttcttcctccacttctttaacttccactcctaagcccctctcaacttttcatccatggaaaacgtaaccaaatgttcaaagtttcatgcaaggttaccaataataacggtgaccaaaaccaaaacgttgaaacgaattctgttgatcgaagaaatgttcttcttggcttaggtggtctttatgggctggcggtggcaagcaggcgctggagggtcactaatgctataccattagctgcatccgctactccatctccacctcctgatctctcgtcttgtagtatagccaggattaacgaaactcatgtggtgccgtacagttgttgcgcgcctaagcctgatgatatggagaaagttccgtattacaagttcccttctatgactaagctccgtgttcgtcagcctgctcatgaagctaatgaggagtatattgccaagtacaatttggcggttagcaagatgagggatcttgataagacacaacc

SEQ ID NO: 108 - DNA, 512 bp, Artificial
  Mutation introduced by TALE nuclease pair POT32_T01 within a POT32 allele
gcaagcttgtgcaatagtagtagtacatctctcaaaactccttttacttcttcctccacttctttaacttccactcctaagccctctcaacttttcatccatggaaaacgtaaccaaatgttcaaagtttcatgcaaggttatcaataataacggtgaccaaaacgttgaaacgaattctgttgatcgaagaaatgttcttcttggcttaggtggtctttatggtgtcacctcgctgtacgtcacccacgatcagctaatgctataccattagctgcatccgctgctccaactccacctcctgatctctcgtcttgtagtatagccaggattaacgaaaatcaggtggtgccgtacagttgttgcgcgcctaagcctgatgatatggagaaagttccgtattacaagttcccttctatgactaagctccgtgttcgtcagcctgctcatgaagctaatgaggagtatattgccaagtacaatctggcgattagtcgaatgagagatcttgat

SEQ ID NO: 109 - DNA, 546 bp, Artificial
  Mutation introduced by TALE nuclease pair POT32_T01 within a POT32 allele
gcaagcttgtgcaatagttgtagtacatccctcaaaactccttttacttcttcctccacttctttaacttccactcctaaaccctctcaacttttcatccatggaaaacgtaaccaaatgttcaaagtttcatgcatggttaccaataataacggtgaccaaaaccaaaacgttgaaacgaattctgttgatcgaagaaatgttcttcttggcttaggtggtctttatggtgacgctcagtggaacgaaaactcacgttaagggattttggtcatgagattatcaaaaaggatcttcacctagatccttttaaattactaatgctataccattagctgcatccgctactccatctccacctcctgatctctcgtcttgtagtatagccaggattaacgaaactcatgtggtgccgtacagttgttgcgcgcctaagcctgatgatatggagaaagttccgtattacaagttcccttctatgactaagctccgtgttcgtcagcctgctcatgaagctaatgaggagtatattgccaagtacaattt

SEQ ID NO: 110 - DNA, 531 bp, Artificial
  Mutation introduced by TALE nuclease pair POT32_T01 within a POT32 allele
gcaagcttgtgcaatagtagtagtacatctctcaaaactccttttacttcttcctccacttctttaacttccactcctaagcccctctcaacttttcatccatggaaaacgtaaccaaaatgttcaaaagtttcatgcaaggttaccaataataacggtgaccaaaaccaaaacgttgaaacgaattctgttgatcgaagaaatgttcttcttggcttaggtggtctttatgggctggcggtggcaagcaggcgctggagggtcactaatgctataccattagctgcatccgctactccatctccacctcctgatctctcgtcttgtagtatagccaggattaacgaaactcatgtggtgccgtacagttgttgcgcgcctaagcctgatgatatggagaaagttccgtattacaagttccttctatgactaagcttccgtgttcgtcagcctgctcatgaagctaatgaggagtatattgccaagtacaatttggcggttagcaagatgagggatcttgataagacacaa

SEQ ID NO: 111 - DNA, 527 bp, Artificial
  Mutation introduced by TALE nuclease pair POT32_T01 within a POT32 allele
gcaagcttgtgcaatagttgtagtacatctctcaaaactccttttacttcttcctccacttctttatcttccactcctaagcccctctcaacttttcatccatggaaaacgtaaccaaatgttcaaagtttcatgcaaggttatcaataataacggtgaccaaaacgttgaaacgaattctgttgatcgaagaaatgttcttcttggcttaggtggtctttatggtgttgtctccagcgcctgcttgccaccgccatcgctaatgctataccattagctgcatccgctgctccaactccacctcctgatctctcgtcttgtagtatagccaggattaacgaaaatcaggtggtgccgtacagttgttgcgcgcctaagcctgatgatatggagaaagttccgtattacaagttcccttctatgactaagctccgtgttcgtcagcctgctcatgaagctaatgaggagtatattgccaagtacaatctggcgattagtcgaatgagagatcttgataagacacaacc

SEQ ID NO: 112 - DNA, 522 bp, Artificial
  Mutation introduced by TALE nuclease pair POT32_T01 within a POT32 allele
  misc_feature (367): n is a or c or t or g
gcaagcttgtgcaatagtagtagtacatctctcaaaactccttttacttcttcctccacttctttaacttccactcctaagcccctctcaacttttcatccatggaaaacgtaaccaaatgttcaaagtttcatgcaaggttatcaataataacggtgaccaaaacgttgaaacgaattctgttgatcgaagaaatgttcttcttggcttaggtggtctttatggtgtcacctcgctgtacgtcacccacgatcagctaatgctataccattagctgcatccgctgctccaactccacctcctgatctctcgtcttgtagtatagccggattaacgaaaatcaggtggtgccgtacagttgttgcgngcctaagcctgatgtatggagaaagttccgtattacaagttcccttctatgactaagctccgtgttcgtcagcctgctcatgaagctaatgaggagtatattgccaagtacaatctggcgattagtcgaatgagagatcttgataagacacaacc

SEQ ID NO: 113 - DNA, 512 bp, Artificial
  Mutation introduced by TALE nuclease pair POT32_T02 within a POT32 allele
gcaagcttgtcaatagtagtagtacatcctcaaaactccttttacttcttcctccacttctttaacttccactcctaaaccctctcaacttttcatccatggaaaacgtaaccaaatgttcaaagtttcatgcatggttaccaataataacggtgaccaaaaccaaaacgttgaaacgaattctgttgatcgaagaaatgttcttcttggcttaggtggtctttatggtgttgctaatgctataccattagctgcatccgctactccatctccacctcctgatctctcgtcttgtagtatagccaggattaacgaaactcatgtggtgccgtacagttgttgcgcgcctaagcctgatgatatggagaaagttccgtattacaagttcccttctatgactaagctctgtcagcctgctcatgaagctaatgaggagtatattgccaagtacaatttggcggttagcaagatgagggatcttgataagacacaacctttaaaccctattggtt

SEQ ID NO: 114 - DNA, 490 bp, Artificial
  Mutation introduced by TALE nuclease pair POT32_T02 within a POT32 allele
gcaagcttgtgcaatagtagtagtacatctctcaaaactccttttacttcttcctccacttctttaacttccactcctaagccctctcaacttttcatccattggaaaacgtaaccaaatgttcaaagtttcatgcaaggttaccaataataacggtgaccaaaaccaaaacgttgaaacgaattctgttgatcgaagaaatgttcttcttggcttaggtggtctttatggtgttgctaatgctataccattagctgcatccgctgctccagctccacctcctgatctctcgtcttgtagtatagccaggattaacgaaaatcaggtggtgccgtacagttgttgcgcgcctaagcctgatgatatggagaaagttccgtattacaagttcgtcagcctgctcatgaagctaatgaggagtatattgccaagtacaatttggcggttagcaagatgagggatcttgataagacacaacctttaaacccta

SEQ ID NO: 115 - DNA, 511 bp, Artificial
  Mutation introduced by TALE nuclease pair POT32_T02 within a POT32 allele
gcaagcttgtgcaatagtagtagtacatctctcaaaactccttttacttcttcctccacttctttatcttccactcctaagccctctcaacttttcatccatggaaaacgtaaccaaatgttcaaagtttcatgcaaggttaccaataataacggtgaccaaaaccaaaacgttgaaacaaattctgttgatcgaagaaatgttcttcttggcttaggtggtctttatggtgttgctaatgctataccattagctgcatccgctgctccagctccacctcctgatctctcgtcttgtagtatagccaggattaacgaaaatcaggtggtgccgtacagttgttgcgcgcctaagcctgatgatatggagaaagttccgtattacaagttcccttctatgactaagcttcagcctgctcatgaagctaatgaggagtatattgccaagtacaatttggcggttagcaagatgagggatcttgataagacacaacctttaaaccctattggtt

SEQ ID NO: 116 - DNA, 493 bp, Artificial
  Mutation introduced by TALE nuclease pair POT32_T02 within a POT32 allele
gcaagcttgtgcaatagttgtagtacatcctcaaacatccttttacttcttcctccacttctttaacttccactcctaaacccctctcaacttttcatccatggaaacgtaaccaaatgttcaaagtttcatgcatggttaccaataataacggtgaccaaaaccaaaacgttgaaacgaattctgttgatcgaagaaatgttcttcttggcttaggtggtctttatggtgttgctaatgctataccattagctgcatccgctactccatctccacctcctgatctctcgtcttgtagtatagccaggattaacgaaactcatgtggtgccgtacagttgttgcgcgcctaagcctgatgatatggagaaagttccgtattacaagttcccttctacagcctgctcatgaagctaatgaggagtatattgccaagtacaatctggcgattagtcgaatgaaagatcttgataagacacaacctttaaacccta

SEQ ID NO: 117 - DNA, 502 bp, Artificial
  Mutation introduced by TALE nuclease pair POT32_T02 within a POT32 allele
gcaagcttgtgcaatagttgtagtacatctctcaaaactccttttacttcttcctccacttctttaacttccactcctaaaccctctcaacttttcatccatggaaaacgtaaccaaatgttcaaagtttcatgcaaggttaccaataataacggtgaccaaaaccaaaacgttgaaacgaattctgttgatcgaagaaatgttcttcttggcttaggtggtctttatggtgttgctaatgctataccattagctgcatccgctactccatctccacctcctgatctctcgtcttgtagtatagccaggattaacgaaactcatgtggtgccgtacagttgttgcgcgcctaagcctgatgatatggagaaagttccgtattacaagttcccttctatgactaagcagcctgctcatgaagctaatgaggagtatattgccaagtacaatttggcggttagcaagatgagggatcttgataagacacaacctttaaacccta

SEQ ID NO: 118 - DNA, 480 bp, Artificial
  Mutation introduced by TALE nuclease pair POT32_T02 within a POT32 allele
gcaagcttgtgcaatagtagtagtacatctctcaaaactccttttacttcttcctccacttctttaacttccactcctaagccctctcaacttttcatccatggaaaacgtaaccaaatgttcaaagtttcatgcatggttaccaataataacggtgaccaaaaccaaaacgttgaaacgaattctgttgatcgaagaaatgttcttcttggcttaggtggtctttatggtgttgctaatgctataccattagctgcatccgctactccatctccacctcctgatctctcgtcttgtagtatagccaggattaacgaaactcatgtggtgccgtacagttgttgcgcgcctaagcctgatgatatggagaaagttccgtattacaagttcccttctatgcctgctcatgaagctaatgaggagtatattgccaagtacaatctggcgattagtcgaatgaaagatcttgataagacacaa

SEQ ID NO: 119 - DNA, 513 bp, Artificial
  Mutation introduced by TALE nuclease pair POT32_T02 within a POT32 allele
gcaagcttgtcaatagtagtagtacatccctcaaaactccttttacttcttcctccacttctttaacttccactcctaaaccctctcaacttttcatccatggaaaacgtaaccaaatgttcaaagtttcatgcatggttaccaataataacggtgaccaaaaccaaaacgttgaaacgaattctgttgatcgaagaaatgttcttcttggcttaggtggtctttatggtgttgctaatgctataccattagctgcatccgctactccatctccacctcctgatctctcgtcttgtagtatagccaggattaacgaaactcatgtggtgccgtacagttgttgcgcgcctaagcctgatgatatggagaaagttccgtattacaagttcccttctatgactaagctctgtcagcctgctcatgaagctaatgaggagtatattgccaagtacaatttggcggttagcaagatgagggatcttgataagacacaacctttaaaccctattggtt

SEQ ID NO: 120 - DNA, 514 bp, Artificial
  Mutation introduced by TALE nuclease pair POT32_T02 within a POT32 allele
gcaagcttgtgcaatagtagtagtacatctctcaaaactccttttacttcttcctccacttctttatcttccactcctaagccctctcaacttttcatccatggaaaacgtaaccaaatgttcaaagtttcatgcaaggttaccaataataacggtgaccaaaaccaaaacgttgaaacgaattctgttgatcgaagaaatgttcttcttggcttaggtggtctttatggtgttgctaatgctataccattagctgcatccgctgctccagctccacctcctgatctctcgtcttgtagtatagccaggattaacgaaaatcaggtggtgccgtacagttgttgcgcgcctaagcctgatgatatggagaaagttccgtattacaagttcccttctatgactaagctcctcagcctgctcatgaagctaatgaggagtatattgccaagtacaatttggcggttagcaagatgaggggatcttgataagacacaacctttaaaccctattggtt

SEQ ID NO: 121 - DNA, 514 bp, Artificial
  Mutation introduced by TALE nuclease pair POT32_T02 within a POT32 allele
gcaagcttgtgcaatagtagtagtacatctctcaaaactccttttacttcttcctccacttctttaacttccactcctaaaccctctcaacttttcatccatggaaaacgtaaccaaatgttcaaagtttcatgcaaggttaccaataataacggtgaccaaaaccaaaacgttgaaacgaattctgttgatcgaagaaatgttcttcttggcttaggtggtctttatggtgttgctaatgctataccattagctgcatccgctactccatctccacctcctgatctctcgtcttgtagtatagccaggattaacgaaactcatgtggtgccgtacagttgttgcgcgcctaagcctgatgatatggagaaagttccgtattacaagttcccttctatgactaagctccgtcagcctgctcatgaagctaatgaggagtatattgccaagtacaatttggcggttagcaagatgagggatcttgataagacacaacctttaaaccctattggtt

SEQ ID NO: 122 - DNA, 477 bp, Artificial
  Mutation introduced by TALE nuclease pair POT32_T02 within a POT32 allele
gcaagcttgtgcaatagtagtagtacatctctcaaaactccttttacttcttcctccacttctttatcttccactcctaagcccctctcaacttttcatccatggaaaacgtaaccaaatgttcaaagtttcatgcaaggttaccaataataacggtgaccaaaaccaaaacgttgaaacaaattctgttgatcgaagaaatgttcttcttgggcttaggtggtctttatggtgttgctaatgctataccattagctgcatccgctgctccagctccacctcctgatctctcgtcttgtagtatagccaggattaacgaaaatcaggtggtgccgtacagttgttgcgcgcctaagcctgatgatatggagaaagttccgtattacaagttcccttctatgactaagctccgcctgctcatgaagctaatgaggagtatattgccaagtacaatctggcgattagtcgaatgaaaga

SEQ ID NO: 123 - DNA, 445 bp, Artificial
  Mutation introduced by TALE nuclease pair POT32_T02 within a POT32 allele
gcaagcttgtgcaatagttgtagtacatctctcaaaactccttttacttcttcctccacttctttaacttccactcctaaaccctctcaacttttcatccatggaaaacgtaaccaaatgttcaaagtttcatgcaaggttaccaataataacggtgaccaaaaccaaaacgttgaaacgaattctgttgatcgaagaaatgttcttcttggcttaggtggtctttatggtgttgctaatgctataccattagctgcatccgctactccatctccacctcctgatctctcgtcttgtagtatagccaggattaacgaaactcatgtggtgccgtacagttgttgcgcgcctaagcctgatgatatggagaaagttccgtattacaagtacaatttggcggttagcaagatgagggatcttgataagacacaacctttaaacccta

SEQ ID NO: 124 - DNA, 497 bp, Artificial
  Mutation introduced by TALE nuclease pair POT32_T02 within a POT32 allele
gcaagcttgtgcaatagttgtagtacatctctcaaaactccttttacttcttcctccacttctttaacttccactcctaaaccctctcaacttttcatccatggaaaacgtaaccaaatgttcaaagtttcatgcatggttaccaataataacggtgaccaaaaccaaaacgttgaaacgaattctgttgatcgaagaaatgttcttcttggcttaggtggtctttatggtgttgctaatgctataccattagctgcatccgctactccatctccacctcctgatctctcgtcttgtagtatagccaggattaacgaaactcatgtggtgccgtacagttgttgcgcgcctaagcctgatgatatggagaaagttccgtattacaagttcccttctatgacagcctgctcatgaagctaatgaggagtatattgccaagtacaatttggcggttagcaagatgagggatcttgataagacacaacctttaaacccta

SEQ ID NO: 125 - DNA, 512 bp, Artificial
  Mutation introduced by TALE nuclease pair POT32_T02 within a POT32 allele
gcaagcttgtgcaatagtagtagtacatctctcaaaactccttttacttcttcctccacttctttatcttccactcctaagccctctcaacttttcatccatggaaacgtaaccaaatgttcaaagtttcatgcaaggttaccaataataacggtgaccaaaaccaaaacgttgaaacaaattctgttgatcgaagaaatgttcttcttggcttaggtggtctttatggtgttgctaatgctataccattagctgcatccgctgctccagctccacctcctgatctctcgtcttgtagtatagccaggattaacgaaaatcaggtggtgccgtacagttgttgcgcgcctaagcctgatgatatggagaaagttccgtattacaagttcccttctatgactaagctcgtcagcctgctcatgaagctaatgaggagtatattgccaagtacaatctggcgattagtcgaatgaaagatcttgataagacacaacctttaaaccctattggtt

SEQ ID NO: 126 - DNA, 514 bp, Artificial
  Mutation introduced by TALE nuclease pair POT32_T02 within a POT32 allele
gcaagcttgtgcaatagtagtagtacatctctcaaaactccttttacttcttcctccacttctttaacttccactcctaagccctctcaacttttcatccatggaaaacgtaaccaaatgttcaaagtttcatgcaaggttaccaataataacggtgaccaaaaccaaaacgttgaaacgaattctgttgatcgaagaaatgttcttcttggcttaggtggtctttatggtgttgctaatgctataccattagctgcatccgctgctccagctccacctcctgatctctcgtcttgtagtatagccaggattaacgaaaatcaggtggtgccgtacagttgttgcgcgcctaagcctgatgatatggagaaagttccgtattacaagttcccttctatgactaagctccgtcagcctgctcatgaagctaatgaggagtatattgccaagtacaatttggcggttagcaagatgagggatcttgataagacacaacctttaaaccctattggtt

SEQ ID NO: 127 - DNA, 513 bp, Artificial
  Mutation introduced by TALE nuclease pair POT32_T02 within a POT32 allele
gcaagcttgtgcaatagttgtagtacatcctcaaaactccttttacttcttcctccacttctttaacttccactcctaaaccctctcaacttttcatccatggaaaacgtaaccaaatgttcaaagtttcatgcatggttaccaataataacggtgaccaaaaccaaaacgttgaaacgaattctgttgatcgaagaaatgttcttcttggcttaggtggtctttatggtgttgctaatgctataccattagctgcatccgctactccatctccacctcctgatctctcgtcttgtagtatagccaggattaacgaaactcatgtggtgccgtacagttgttgcgcgcctaagcctgatgatatggagaaagttccgtattacaagttcccttctatgactaagctccgtcagcctgctcatgaagctaatgaggagtatattgccaagtacaatctggcgattagtcgaatgaaagatcttgataagacacaacctttaaaccctattggtt

SEQ ID NO: 128 - DNA, 510 bp, Artificial
  Mutation introduced by TALE nuclease pair POT32_T02 within a POT32 allele
gcaagcttgtgcaatagtagtagtacatctctcaaaactccttttacttcttcctccacttctttatcttccactcctaagccctctcaactttcatccattggaaacgataaccaaatgattcaaagtttcaatgcaaggttatcaataataacggtgaccaaaacgttgaaacgaattctgttgatcgaagaaatgttcttcttggcttaggtggtctttatggtgttgctaatgctataccattagctgcatccgctgctccaactccacctcctgatctctcgtcttgtagtatagccaggattaacgaaaatcaggtggtgccgtacagttgttgcgcgcctaagcctgatgatatggagaaagttccgtattacaagttcccttctatgactaagctccgtcagcctgctcatgaagctaatgaggagtatattgccaagtacaatctggcgattagtcgaatgagagatcttgataagacacaacctttaaaccctattggtt

SEQ ID NO: 129 - DNA, 511 bp, Artificial
  Mutation introduced by TALE nuclease pair POT32_T02 within a POT32 allele
gcaagcttgtgcaatagtagtagtacatccctcaaaactccttttacttcttcctccacttctttaacttccactcctaaaccctctcaacttttcatccatggaaaacgtaaccaaatgttcaaagtttcatgcatggttaccaataataacggtgaccaaaaccaaaacgttgaaacgaattctgttgatcgaagaaatgttcttcttggcttaggtggtctttatggtgttgctaatgctataccattagctgcatccgctactccatctccacctcctgatctctcgtcttgtagtatagccaggattaacgaaactcatgtggtgccgtacagttgttgcgcgcctaagcctgatgatatggagaaagttccgtattacaagttcccttctatgactaagctccagcctgctcatgaagctaatgaggagtatattgccaagtacaatctggcgattagtcgaatgaaagatcttgataagacacaacctttaaaccctattggtt

SEQ ID NO: 130 - DNA, 499 bp, Artificial
  Mutation introduced by TALE nuclease pair POT32_T02 within a POT32 allele
gcaagcttgtgcaatagttgtagtacatccctcaaaactccttttacttcttcctccacttctttaacttccactcctaaaccctctcaacttttcatccatggaaacgtaaccaaatgttcaaagtttcatgcatggttaccaataataacggtgaccaaaaccaaaacgttgaaacgaattctgttgatcgaagaaatgttcttcttggcttaggtggtctttatggtgttgctaatgctataccattagctgcatccgctactccatctccacctcctgatctctcgtcttgtagtatagccaggattaacgaaactcatgtggtgccgtacagttgttgcgcgcctaagcctgatgatatggagaaagttccgtattacaagttcccttctatgacgtcagcctgctcatgaagctaatgaggagtatattgccaagtacaatttggcggttagcaagatgagggatcttgataagacacaacctttaaacccta

SEQ ID NO: 131 - DNA, 489 bp, Artificial
  Mutation introduced by TALE nuclease pair POT32_T02 within a POT32 allele
gcaagcttgtgcaatagtagtagtacatctctcaaaactccttttacttcttcctccacttctttatcttccactcctaagccctctcaacttttcatccatggaaaacgtaaccaaatgttcaaagtttcatgcaaggttaccaataataacggtgaccaaaaccaaaacgttgaaacgaattctgttgatcgaagaaatgttcttcttggcttaggtggtctttatggtgttgctaatgctataccattagctgcatccgctgctccagctccacctcctgatctctcgtcttgtagtatagccaggattaacgaaaatcaggtggtgccgtacagttgttgcgcgcctaagcctgatgatatggagaaagttccgtattacaagttcccttctatgactaagctccgtgttcatgaagctaatgaggagtatattgccaagtacaatttggcggttagcaagatgagggatcttgataagacacaa

SEQ ID NO: 132 - DNA, 514 bp, Artificial
  Mutation introduced by TALE nuclease pair POT32_T02 within a POT32 allele
  misc_feature (159): n is a or c or t or g
gcaagcttgtgcaatagtagtagtacatccctcaaaactccttttacttcttcctccacttctttaacttccactcctaaacccctctcaacttttcatccatggaaaacgtaaccaaatgttcaaagtttcatgcatggttaccaataataacggtgnccaaaaccaaaacgttgaaacgaattctgttgatcgaagaaatgttcttcttggcttaggtggtctttatggtgttgctaatgctataccattagctgcatccgctactccatctccacctcctgatctctcgtcttgtagtatagccaggattaacgaaactcatgtggtgccgtacagttgttgcgcgcctaagcctgatgatatggagaaagttccgtattacaagttcccttctatgactaagctcctcagcctgctcatgaagctaatgaggagtatattgccaagtacaatctggcgattagtcgaatgaaagatcttgataagacacaacctttaaaccctattggtt

SEQ ID NO: 133 - DNA, 497 bp, Artificial
  Mutation introduced by TALE nuclease pair POT32_T02 within a POT32 allele
gcaagcttgtgcaatagttgtagtacatctctcaaaactccttttacttcttcctccacttctttaacttccactcctaaaccctctcaacttttcatccatggaaaacgtaaccaaatgttcaaagtttcatgcaaggttaccaataataacggtgaccaaaaccaaaacgttgaaacgaattctgttgatcgaagaaatgttcttcttggcttaggtggtctttatggtgttgctaatgctataccattagctgcatccgctactccatctccacctcctgatctctcgtcttgtagtatagccaggattaacgaaactcatgtggtgccgtacagttgttgcgcgcctaagcctgatgatatggagaaagttccgtattacaagttcccttctatgactaagctccgtcagcctgctcatgaagctaatgaggagtatattgccaagtacaatttggcggttagcaagatgagggatcttgataagacacaacc

SEQ ID NO: 134 - DNA, 514 bp, Artificial
  Mutation introduced by TALE nuclease pair POT32_T02 within a POT32 allele
gcaagcttgtgcaatagtagtagtacatctctcaaaactccttttacttcttcctccacttctttaacttccactcctaagccctctcaacttttcatccatggaaaacgtaaccaaatgttcaaagtttcatgcaaggttaccaataataacggtgaccaaaaccaaaacgttgaaacgaattctgttgatcgaagaaatgttcttcttggcttaggtggtctttatggtgttgctaatgctataccattagctgcatccgctgctccagctccacctcctgatctctcgtcttgtagtatagccaggattaacgaaaatcaggtggtgccgtacagttgttgcgcgcctaagcctgatgatatggagaaagttccgtattacaagttcccttctatgactaagctccgtcagcctgctcatgaagctaatgaggagtatattgccaagtacaatctggcgattagtcgaatgaaagatcttgataagacacaacctttaaaccctattggtt

SEQ ID NO: 135 - DNA, 509 bp, Artificial
  Mutation introduced by TALE nuclease pair POT32_T02 within a POT32 allele
gcaagcttgtgcaatagtagtagtacatctctcaaaactccttttacttcttcctccacttctttatcttccactcctaagcccctctcaacttttcatccatggaaaacgtaaccaaatgttcaaagtttcatgcaaggttatcaataataacggtgaccaaaacgttgaaacgaattctgttgatcgaagaaatgttcttcttggcttaggtggtctttatggtgttgctaatgctataccattagctgcatccgctgctccaactccacctcctgatctctcgtcttgtagtatagccaggattaacgaaaatcaggtggtgccgtacagttgttgcgcgcctaagcctgatgatatggagaaagttccgtattacaagttcccttctatgactaagctccgtcagcctgctcatgaagctaatgaggagtatattgccaagtacaatctggcgattagtcgaatgagagatcttgataagacacaacctttaaaccctattggtt

SEQ ID NO: 136 - DNA, 482 bp, Artificial
  Mutation introduced by TALE nuclease pair POT32_T02 within a POT32 allele
gcaagcttgtgcaatagtagtagtacatctctcaaaactccttttacttcttcctccacttctttatcttccactcctaagccctctcaactttcatccatggaaaacgtaaccaaatgttcaaagtttcatgcaaggttatcaataataacggtgaccaaaacgttgaaacgaattctgttgatcgaagaaatgttcttcttggcttaggtggtctttatggtgttgctaatgctataccattagctgcatccgctgctccaactccacctcctgatctctcgtcttgtagtatagccaggattaacgaaaatcaggtggtgccgtacagttgttgcgcgcctaagcctgatgatatggagaaagttccgtattacaagttcccttctatgactaagctcctgctcatgaagctaatgaggagtatattgccaaagtacaatctggcgattagtcgaatgagagatcttgataagacacaa

SEQ ID NO: 137 - DNA, 513 bp, Artificial
  Mutation introduced by TALE nuclease pair POT32_T02 within a POT32 allele
gcaagcttgtgcaatagtagtagtacatcctcaaaactccttttacttcttcctccacttctttaacttccactcctaaaccctctcaacttttcatccatggaaaacgtaaccaaatgttcaaagtttcatgcatggttaccaataataacggtgaccaaaaccaaaacgttgaaacgaattctgttgatcgaagaaatgttcttcttggcttaggtggtctttatggtgttgctaatgctataccattagctgcatccgctactccatctccacctcctgatctctcgtcttgtagtatagccaggattaacgaaactcatgtggtgccgtacagttgttgcgcgcctaagcctgatgatatggagaaagttccgtattacaagttcccttctatgactaagctccgtcagcctgctcatgaagctaatgaggagtatattgccaagtacaatttggcggttagcaagatgagggatcttgataagacacaacctttaaaccctattggtt

SEQ ID NO: 138 - DNA, 474 bp, Artificial
  Mutation introduced by TALE nuclease pair POT32_T02 within a POT32 allele
gcaagcttgtcaatagtagtagtacatccctcaaaactccttttacttcttcctccacttctttaacttccactcctaaaccctctcaacttttcatccatggaaaacgtaaccaaatgttcaaagtttcatgcatggttaccaataataacggtgaccaaaaccaaaacgttgaaacgaattctgttgatcgaagaaatgttcttcttggcttaggtggtctttatggtgttgctaatgctataccattagctgcatccgctactccatctccacctcctgatctctcgtcttgtagtatagccaggattaacgaaactcatgtggtgccgtacagttgttgcgcgcctaagcctgatgatatggagaaagttccgtattacaagttcccttctatgactaagctctgtcagcctgctcatgaagctaatgaggagtatattgccaagtacaatttggcggttagcaagatga

SEQ ID NO: 139 - DNA, 513 bp, Artificial
  Mutation introduced by TALE nuclease pair POT32_T02 within a POT32 allele
gcaagcttgtgcaatagtagtagtacatctctcaaaactccttttacttcttcctccacttctttaacttccactcctaaaccctctcaacttttcatccatggaaaacgtaaccaaatgttcaaagtttcatgcaaggttaccaataataacggtgaccaaaaccaaaacgttgaaacgaattctgttgatcgaagaaatgttcttcttggcttaggtggtctttatggtgttgctaatgctataccattagctgcatccgctactccatctccacctcctgatctctcgtcttgtagtatagccaggattaacgaaactcatgtggtgccgtacagttgttgcgcgcctaagcctgatgatatggagaaagttccgtattacaagttcccttctatgactaagctcgtcagcctgctcatgaagctaatgaggagtatattgccaagtacaatctggcgattagtcgaatgaaagatcttgataagacacaacctttaaaccctattggtt

SEQ ID NO: 140 - DNA, 510 bp, Artificial
  Mutation introduced by TALE nuclease pair POT32_T02 within a POT32 allele
gcaagcttgtgcaatagtagtagtacatctctcaaaactccttttacttcttcctccacttctttaacttccactcctaaaccctctcaacttttcatccatggaaaacgtaaccaaatgttcaaagtttcatgcaaggttaccaataataacggtgaccaaaaccaaaacgttgaaacgaattctgttgatcgaagaaatgttcttcttggcttaggtggtctttatggtgttgctaatgctataccattagctgcatccgctactccatctccacctcctgatctctcgtcttgtagtatagccaggattaacgaaactcatgtggtgccgtacagttgttgcgcgcctaagcctgatgatatggagaaagttccgtattacaagttcccttctatgactaagctccagctgctcatgaagctaatgaggagtatattgccaagtacaatttggcggttagcaagatgagggatcttgataagacacaacctttaaaccctattggtt

SEQ ID NO: 141 - DNA, 488 bp, Artificial
  Mutation introduced by TALE nuclease pair POT32_T02 within a POT32 allele
gcaagcttgtgcaatagtagtagtacatctctcaaaactccttttacttcttcctccacttctttatcttccactcctaagccctctcaacttttcatccatggaaaacgtaaccaaatgttcaaagtttcatgcaaggttaccaataataacggtgaccaaaaccaaaacgttgaaacaaattctgttgatcgaagaaatgttcttcttggcttaggtggtctttatggtgttgctaatgctataccattagctgcatccgctgctccagctccacctcctgatctctcgtcttgtagtatagccaggattaacgaaaatcaggtggtgccgtacagttgttgcgcgcctaagcctgatgatatggagaaagttccgtattacaagttcccttctatgactaagctccgttgaggagtatattgccaagtacaatctggcgattagtcgaatgaaagatcttgataagacacaacctttaaacccta

SEQ ID NO: 142 - DNA, 516 bp, Artificial
  Mutation introduced by TALE nuclease pair POT32_T02 within a POT32 allele
gcaagcttgtgcaatagtagtagtacatctctcaaaactccttttacttcttcctccacttctttatcttccactcctaagccctctcaacttttcatccattggaaaacgataaccaaatgttcaaagtttcatgcaaggttaccaataataacggtgaccaaaaccaaaacgttgaaacaaattctgttgatcgaagaaatgttcttcttggcttaggtggtctttatggtgttgctaatgctataccattagctgcatccgctgctccagctccacctcctgatctctcgtcttgtagtatagccaggattaacgaaaatcaggtggtgccgtacagttgttgcgcgcctaagcctgatgatatggagaaagttccgtattacaagttcccttctatgactaagctccgtcagcctgctcatgaagctaatgaggagtatattgccaagtacaatctggcgattagtcgaatgaaagatcttgataagacacaacctttaaaccctattggtt

SEQ ID NO: 143 - DNA, 487 bp, Artificial
  Mutation introduced by TALE nuclease pair POT32_T02 within a POT32 allele
gcaagcttgtgcaatagtagtagtacatccctcaaaactccttttacttcttcctccacttctttaacttccactcctaaaccctctcaacttttcatccatggaaaacgtaaccaaatgttcaaagtttcatgcatggttaccaataataacggtgaccaaaaccaaaacgttgaaacgaattctgttgatcgaagaaatgttcttcttggcttaggtggtctttatggtgttgctaatgctataccattagctgcatccgctactccatctccacctcctgatctctcgtcttgtagtatagccaggattaacgaaactcatgtggtgccgtacagttgttgcgcgcctaagcctgatgatatggagaaagttccgtattacaagttcccttctatgactaagctccgtgttatattgccaagtacaatctggcgattagtcgaatgagagatcttgataagacacaacctttaaaccctattgg

SEQ ID NO: 144 - DNA, 514 bp, Artificial
  Mutation introduced by TALE nuclease pair POT32_T02 within a POT32 allele
  misc_feature (292): n is a or c or t or g
gcaagcttgtgcaatagtagtagtacatctctcaaaactccttttacttcttcctccacttctttaacttccactcctaagccctctcaacttttcatccatggaaaacgtaaccaaatgttcaaagtttcatgcaaggttaccaataataacggtgaccaaaaccaaaacgttgaaacgaattctgttgatcgaagaaatgttcttcttggcttaggtggtctttatggtgttgctaatgctataccattagctgcatccgctgctccaactccacctcctgatctcttcncttgtagtatagccaggattaacgaaaatcaggtggtgccgtacagttgttgcgcgcctaagcctgatgatatggagaaagttccgtattacaagttcccttctatgactaagctccgtcagcctgctcatgaagctaatgaggagtatattgccaagtacaatttggcggttagcaagatgagggatcttgataagacacaacctttaaaccctattggtt

SEQ ID NO: 145 - DNA, 512 bp, Artificial
  Mutation introduced by TALE nuclease pair POT32_T02 within a POT32 allele
gcaagcttgtgcaatagtagtagtacatctctcaaaactccttttacttcttcctccacttctttaacttccactcctaagccctctcaacttttcatccatggaaaacgtaaccaaatgttcaaagtttcatgcaaggttaccaataataacggtgaccaaaaccaaaacgttgaaacgaattctgttgatcgaagaaatgttcttcttggcttaggtggtctttatggtattgctaatgctataccattagctgcatccgctgctccagctccacctcctgatctctcgtcttgtagtatagccaggattaacgaaaatcaggtggtgccgtacagttgttgcgcgcctaagcctgatgatatggagaaagttccgtattacaagttcccttctatgactaagctctcagcctgctcatgaagctaatgaggagtatattgccaagtacaatctggcgattagtcgaatgaaagatcttgataagacacaacctttaaaccctattggtt

SEQ ID NO: 146 - DNA, 513 bp, Artificial
  Mutation introduced by TALE nuclease pair POT32_T02 within a POT32 allele
gcaagcttgtgcaatagttgtagtacatctctcaaaactccttttacttcttcctccacttctttaacttccactcctaaaccctctcaacttttcatccatggaaaacgtaaccaaatgttcaaagtttcatgcaaggttaccaataataacggtgaccaaaaccaaaacgttgaaacgaattctgttgatcgaagaaatgttcttcttggcttaggtggtctttatggtgttgctaatgctataccattagctgcatccgctactccatctccacctcctgatctctcgtcttgtagtatagccaggattaacgaaactcatgtggtgccgtacagttgttgcgcgcctaagcctgatgatatggagaaagttccgtattacaagttcccttctatgactaagctccgtagcctgctcatgaagctaatgaggagtatattgccaagtacaatttggcggttagcaagatgagggatcttgataagacacaacctttaaaccctattggtt

SEQ ID NO: 147 - DNA, 414 bp, Artificial
  Mutation introduced by TALE nuclease pair POT32_T02 within a POT32 allele
gcaagcttgtgcaatagtagtagtacatctctcaaaactccttttacttcttcctccacttctttatcttccactcctaagccctctcaacttttcatccatggaaaacgtaaccaaatgttcaaagtttcatgcaaggttaccaataataacggtgaccaaaaccaaaacgttgaaacaaattctgttgatcgaagaaatgttcttcttggcttaggtggtctttatggtgttgctaatgctataccattagctgcatccgctgctccagctccacctcctgatctctcgtcttgtagtatagccaggattaacgaaaatcaggtggtgccgtacagttgttgcgcgcctaagcctgatgatatggagaaagatgagggatcttgataagacacaacctttaaaccctattgg

SEQ ID NO: 148 - DNA, 486 bp, Artificial
  Mutation introduced by TALE nuclease pair POT32_T02 within a POT32 allele
gcaagcttgtgcaatagtagtagtacatctctcaaaactccttttacttcttcctccacttctttatcttccactcctaagcccctctcaacttttcatccatggaaaacgtaaccaaatgttcaaagtttcatgcaaggttatcaataataacggtgaccaaaacgttgaaacgaattctgttgatcgaagaaatgttcttcttggcttaggtggtctttatggtgttgctaatgctataccattagctgcatccgctgctccaactccacctcctgatctctcgtcttgtagtatagccaggattaacgaaatcaggtggtgccgtacagttgttgcgcgcctaagcctgatgatatggagaagttccgtattacaagttcccttctatgactaagctccgtcagcctgctcatgaagctaatgaggagtatattgccaagtacaatctggcgattagtcgaatgagagatcttgataagacac

SEQ ID NO: 149 - DNA, 437 bp, Artificial
  Mutation introduced by TALE nuclease pair POT32_T02 within a POT32 allele
gcaagcttgtgcaatagttgtagtacatctctcaaaactccttttacttcttcctccacttctttaacttccactcctaaaccctctcaacttttcatccatggaaaacgtaaccaaatgttcaaagtttcatgcaaggttaccaataataacggtgaccaaaaccaaaacgttgaaacgaattctgttgatcgaagaaatgttcttcttggcttaggtggtctttatggtgttgctaatgctataccattagctgcatccgctactccatctccacctcctgatctctcgtcttgtagtatagccaggattaacgaaactcatgtggtgccgtacagttgttgcgcgcctaagcctgatgatatggagaaagttccgtattacaagttcccttctatgactaattgccaagtacaatttggcggttagcaagatga

SEQ ID NO: 150 - DNA, 515 bp, Artificial
  Mutation introduced by TALE nuclease pair POT32_T02 within a POT32 allele
gcaagcttgtgcaatagtagtagtacatctctcaaaactccttttacttcttcctccacttctttaacttccactcctaaaccctctcaacttttcatccatggaaaacgtaaccaaatgttcaaagtttcatgcaaggttaccaataataacggtgaccaaaaccaaaacgttgaaacgaattctgttgatcgaagaaatgttcttcttggcttaggtggtctttatggtgttgctaatgctataccattagctgcatccgctactccatctccacctcctgatctctcgtcttgtagtatagccaggattaacgaaactcatgtggtgccgtacagttgttgcgcgcctaagcctgatgatatggagaaagttccgtattacaagttcccttctatgactaagctcccgtcagcctgctcatgaagctaatgaggagtatattgccaagtacaatttggcggttagcaagatgagggatcttgataagacacaacctttaaaccctattggtt

SEQ ID NO: 151 - DNA, 514 bp, Artificial
  Mutation introduced by TALE nuclease pair POT32_T02 within a POT32 allele
gcaagcttgtgcaatagtagtagtacatccctcaaaactccttttacttcttcctccacttctttaacttccactcctaaaccctctcaacttttcatccatggaaaacgtaaccaaatgttcaaagtttcatgcatggttaccaataataacggtgaccaaaaccaaaacgttgaaacgaattctgttgatcgaagaaatgttcttcttggcttaggtggtctttatggtgttgctaatgctataccattagctgcatccgctactccatctccacctcctgatctctcgtcttgtagtatagccaggattaacgaaactcatgtggtgccgtacagttgttgcgcgcctaagcctgatgatatggagaaagttccgtattacaagttcccttctatgactaagctcccgtcagcctgctcatgaagctaatgaggagtatattgccaagtacaatttggcggttagcaagatgagggatcttgataagacacaacctttaaaccctatggtt

SEQ ID NO: 152 - DNA, 485 bp, Artificial
  Mutation introduced by TALE nuclease pair POT32_T02 within a POT32 allele
gcaagcttgtgcaatagtagtagtacatctctcaaaactccttttacttcttcctccacttctttatcttccactcctaagcccctctcaacttttcatccatggaaaacgtaaccaaatgttcaaagtttcatgcaaggttatcaataataacggtgaccaaaacgttgaaacgaattctgttgatcgaagaaatgttcttcttggcttaggtggtctttatggtgttgctaatgctataccattagctgcatccgctgctccaactccacctcctgatctctcgtcttgtagtatagccaggattaacgaaaatcaggtggtgccgtacagttgttgcgcgcctaagcctgatgatatggagaaagttccgtattacaagttcccttctatgactaagctcctcagcctgctcatgaagctaatgaggagtatattgccaagtacaatctggcgattagtcgaatgagagatcttgataagac

SEQ ID NO: 153 - DNA, 508 bp, Artificial
  Mutation introduced by TALE nuclease pair POT32_T02 within a POT32 allele
gcaagcttgtgcaatagtagtagtacatctctcaaaactccttttacttcttcctccacttctttatcttccactcctaagccctctcaacttttcatccatggaaaacgtaaccaaatgttcaaagtttcatgcaaggttatcaataataacggtgaccaaaacgttgaaacgaattctgttgatcgaagaaatgttcttcttggcttaggtggtctttatggtgttgctaatgctataccattagctgcatccgctgctccaactccacctcctgatctctcgtcttgtagtatagccaggattaacgaaaatcaggtggtgccgtacagttgttgcgcgcctaagcctgatgatatggagaaagttccgtattacaagttcccttctatgactaagctccgtcagcctgctcatgaagctaatgaggagtatattgccaagtacaatctggcgattagtcgaatgagagatcttgataagacacaacctttaaaccctattggtt

SEQ ID NO: 154 - DNA, 481 bp, Artificial
  Mutation introduced by TALE nuclease pair POT32_T02 within a POT32 allele
gcaagcttgtgcaatagtagtagtacatctctcaaaactccttttacttcttcctccacttctttaacttccactcctaagccctctcaacttttcatccatggaaaacgtaaccaaatgttcaaagtttcatgcaaggttaccaataataacggtgaccaaaaccaaaacgttgaaacgaattctgttgatcgaagaaatgttcttcttggcttaggtggtctttatggtgttgctaatgctataccattagctgcatccgctgctccagctccacctcctgatctctcgtcttgtagtatagccaggattaacgaaaatcaggtggtgccgtacagttgttgcgcgcctaagcctgatgatatggagaaagttccgtattacaagttcccttctatgactaagctccgtgttgccaagtacaatttggcggttagcaagatgaggggatcttgataagacacaacctttaaaccctatt

SEQ ID NO: 155 - DNA, 509 bp, Artificial
  Mutation introduced by TALE nuclease pair POT32_T02 within a POT32 allele
gcaagcttgtgcaatagttgtagtacatctctcaaaactccttttacttcttcctccacttctttaacttccactcctaaaccctctcaacttttcatccatggaaaacgtaaccaaatgttcaaagtttcatgcaaggttaccaataataacggtgaccaaaaccaaaacgttgaaacgaattctgttgatcgaagaaatgttcttcttggcttaggtggtctttatggtgttgctaatgctataccattagctgcatccgctactccatctccacctcctgatctctcgtcttgtagtatagccaggattaacgaaactcatgtggtgccgtacagttgttgcgcgcctaagcctgatgatatggagaaagttccgtattacaagttcccttctatgactaagctcagcctgctcatgaagctaatgaggagtatattgccaagtacaatttggcggttagcaagatgagggatcttgataagacacaacctttaaaccctatggtt

SEQ ID NO: 156 - DNA, 515 bp, Artificial
  Mutation introduced by TALE nuclease pair POT32_T02 within a POT32 allele
gcaagcttgtgcaatagttgtagtacatctctcaaaactccttttacttcttcctccacttctttaacttccactcctaaaccctctcaacttttcatccatggaaaacgtaaccaaatgttcaaagtttcatgcaaggttaccaataataacggtgaccaaaaccaaaacgttgaaacgaattctgttgatcgaagaaatgttcttcttggcttaggtggtctttatggtgttgctaatgctataccattagctgcatccgctgctccagctccacctcctgatctctcgtcttgtagtatagccaggattaacgaaaatcaggtggtgccgtacagttgttgcgcgcctaagcctgatgatatggagaaagttccgtattacaagttcccttctatgactaagctccggtcagcctgctcatgaagctaatgaggagtatattgccaagtacaatctggcgattagtcgaatgaaagatcttgataagacacaacctttaaaccctattggtt

SEQ ID NO: 157 - DNA, 514 bp, Artificial
  Mutation introduced by TALE nuclease pair POT32_T02 within a POT32 allele
gcaagcttgtgcaatagtagtagtacatctctcaaaactccttttacttcttcctccacttctttatcttccactcctaagccctctcaacttttcatccatggaaaacgtaaccaaatgttcaaagtttcatgcaaggttaccaataataacggtgaccaaaaccaaaacgttgaaacaaattctgttgatcgaagaaatgttcttcttggcttaggtggtctttatggtgttgctaatgctataccattagctgcatccgctgctccagctccacctcctgatctctcgtcttgtagtatagccaggattaacgaaaatcaggtggtgccgtacagttgttgcgcgcctaagcctgatgatatggagaaagttccgtattacaagttcccttctatgactaagctccgtcagcctgctcatgaagctaatgaggagtatattgccaagtacaatctggcgattagtcgaatgaaagatcttgataagacacaacctttaaaccctattggtt

SEQ ID NO: 158 - DNA, 497 bp, Artificial
  Mutation introduced by TALE nuclease pair POT32_T02 within a POT32 allele
gcaagcttgtgcaatagttgtagtacatctctcaaaactccttttacttcttcctccacttctttaacttccactcctaaaccctctcaacttttcatccatggaaaacgtaaccaaatgttcaaagtttcatgcatggttaccaataataacggtgaccaaaaccaaaacgttgaaacgaattctgttgatcgaagaaatgttcttcttggcttaggtggtctttatggtgttgctaatgctataccattagctgcatccgctactccatctccacctcctgatctctcgtcttgtagtatagccaggattaacgaaactcatgtggtgccgtacagttgttgcgcgcctaagcctgatgatatggagaaagttccgtattacaagttcccttctatgttagcctgctcatgaagctaatgaggagtatattgccaagtacaatttggcggttagcaagatgagggatcttgataagacacaacctttaaacccta

SEQ ID NO: 159 - DNA, 514 bp, Artificial
  Mutation introduced by TALE nuclease pair POT32_T02 within a POT32 allele
gcaagcttgtgcaatagtagtagtacatctctcaaaactccttttacttcttcctccacttctttaacttccactcctaagccctctcaacttttcatccatggaaaacgtaaccaaatgttcaaagtttcatgcaaggttaccaataataacggtgaccaaaaccaaaacgttgaaacgaattctgttgatcgaagaaatgttcttcttggcttaggtggtctttatggtgttgctaatgctataccattagctgcatccgctgctccagctccacctcctgatctctcgtcttgtagtatagccaggattaacgaaaatcaggtggtgccgtacagttgttgcgcgcctaagcctgatgatatggagaaagttccgtattacaagttcccttctatgactaagctccgtctgcctgcctctatgaagctaatgaggagtatattgccaagtacaatctggcgattagtcgaatgaaagatcttgataagacacaacctttaaaccctattgg

SEQ ID NO: 160 - DNA, 513 bp, Artificial
  Mutation introduced by TALE nuclease pair POT32_T02 within a POT32 allele
gcaagcttgtgcaatagtagtagtacatctctcaaaactccttttacttcttcctccacttctttatcttccactcctaagccctctcaacttttcatccatggaaaacgtaaccaatgttcaaagtttcatgcaaggttaccaataataacggtgaccaaaaccaaaacgttgaaacaaattctgttgatcgaagaaatgttcttcttggcttaggtggtctttatggtgttgctaatgctataccattagctgcatccgctgctccagctccacctcctgatctctcgtcttgtagtatagccaggatttaacgaaaatcaggtggtgccgtacagttgttgcgcgcctaagcctgatgatatggagaaagttccgtattacaagttcccttctatgactaagctcgtcagcctgctcatgaagctaatgaggagtatattgccaagtacaatttggcggttagcaagatgagggatcttgataagacacaacctttaaaccctattggtt

SEQ ID NO: 161 - DNA, 513 bp, Artificial
  Mutation introduced by TALE nuclease pair POT32_T02 within a POT32 allele
gcaagcttgtgcaatagtagtagtacatctctcaaaactccttttacttcttcctccacttctttatcttccactcctaagccctctcaacttttcatccattggaaacgtaaccaatgttcaaagtttcaatgcaaggttaccaataataacggtgaccaaaaccaaaacgttgaaacaaattctgttgatcgaagaaatgttcttcttggcttaggtggtctttatggtgttgctaatgctataccattagctgcatccgctgctccagctccacctcctgatctctcgtcttgtagtatagccaggattaacgaaaatcaggtggtgccgtacagttgttgcgcgcctaagcctgatgatatggagaaagttccgtattacaagttcccttctatgactaagctcgtcagcctgctcatgaagctaatgaggagtatattgccaagtacaatttggcggttagcaagatgagggatcttgataagacacaacctttaaaccctattggtt

SEQ ID NO: 162 - DNA, 485 bp, Artificial
  Mutation introduced by TALE nuclease pair POT32_T02 within a POT32 allele
gcaagcttgtgcaatagtagtagtacatctctcaaaactccttttacttcttcctccacttctttatcttccactcctaagcccctctcaacttttcatccatggaaaacgtaaccaaatgttcaaagtttcatgcaaggttaccaataataacggtgaccaaaaccaaaacgttgaaacaaattctgttgatcgaagaaatgttcttcttggcttaggtggtctttatggtgttgctaatgctataccattagctgcatccgctgctccagctccacctcctgatctctcgtcttgtagtatagccaggattaacgaaaatcaggtggtgccgtacagttgttgcgcgcctaagcctgatgatatggagaaagttccgtattacaagttcccttctcctgctcatgaagctaatgaggagtatattgccaagtacaatctggcgattagtcgaaatgaaagatcttgataagacacaacctttt

SEQ ID NO: 163 - DNA, 510 bp, Artificial
  Mutation introduced by TALE nuclease pair POT32_T02 within a POT32 allele
gcaagcttgtgcaatagttgtagtacatctctcaaaactccttttacttcttcctccacttctttaacttccactcctaaaccctctcaacttttcatccatggaaaacgtaaccaaatgttcaaagtttcatgcaaggttaccaataataacggtgaccaaaaccaaaacgttgaaacgaattctgttgatcgaagaaatgttcttcttggcttaggtggtctttatggtgttgctaatgctataccattagctgcatccgctgctccagctccacctcctgatctctcgtcttgtagtatagccaggattaacgaaaatcaggtggtgccgtacagttgttgcgcgcctaagcctgatgatatggagaaagttccgtattacaagttcccttctatgactaagcttcgtcagcctgctcatgaagctaatgaggagtatattgccaagtacaatctggcgattagtcgaatgaaagatcttgataagacacaacctttaaaccctatt

SEQ ID NO: 164 - DNA, 481 bp, Artificial
  Mutation introduced by TALE nuclease pair POT32_T02 within a POT32 allele
gcaagcttgtgcaatagtagtagtacatctctcaaaactccttttacttcttcctccacttctttaacttccactcctaagccctctcaacttttcatccattggaaaacgtaaccaaatgttcaaagtttcatgcatggttaccaataataacggtgaccaaaaccaaaacgttgaaacgaattctgttgatcgaagaaatgttcttcttggcttaggtggtctttatggtgttgctaatgctataccattagctgcatccgctactccatctccacctcctgatctctcgtcttgtagtatagccaggattaacgaaactcatgtggtgccgtacagttgttgcgcgcctaagcctgatgatatggagaaagttccgtattacaagttcccttctatgcctgctcatgaagctaatgaggagtatattgccaagtacaatctggcgattagtcgaatgaaagatcttgataagacacaa

SEQ ID NO: 165 - DNA, 463 bp, Artificial
  Mutation introduced by TALE nuclease pair POT32_T02 within a POT32 allele
gcaagcttgtgcaatagtagtagtacatctctcaaaactccttttacttcttcctccacttctttaacttccactcctaagccctctcaacttttcatccatggaaaacgtaaccaaatgttcaaagtttcatgcaaggttaccaataataacggtgaccaaaaccaaaacgttgaaacgaattctgttgatcgaagaaatgttcttcttggcttaggtggtctttatggtgttgctaatgctataccattagctgcatccgctgctccagctccacctcctgatctctcgtcttgtagtatagccaggattaacgaaaatcaggtggtgccgtacagttgttgcgcgcctaagcctgatgatatggagaaagttccgtattacaagttcccttctatgactaagctccgtcatgcctgctcatgaagctaatgaggagtatattgccaagtacaattgcgtt

SEQ ID NO: 166 - DNA, 515 bp, Artificial
  Mutation introduced by TALE nuclease pair POT32_T02 within a POT32 allele
gcaagcttgtgcaatagtagtagtacatctctcaaaactccttttacttcttcctccacttctttaacttccactcctaagcccctctcaacttttcatccatggaaaacgtaaccaaatgttcaaagtttcatgcaaggttaccaataataacggtgaccaaaaccaaaacgttgaaacgaattctgttgatcgaagaaatgttcttcttggcttaggtggtctttatggtgttgctaatgctataccattagctgcatccgctactccatctccacctcctgatctctcgtcttgtagtatagccaggattaacgaaactcatgtggtgccgtacagttgttgcgcgcctaagcctgatgatatggagaaagttccgtattacaagttcccttctatgactaagctccgtcagcctgctcatgaagctaatgaggagtatattgccaagtacaatttggcggttagcaagatgagggatcttgataagacacaacctttaaaccctattggtt

SEQ ID NO: 167 - DNA, 510 bp, Artificial
  Mutation introduced by TALE nuclease pair POT32_T02 within a POT32 allele
gcaagcttgtgcaatagttgtagtacatccctcaaaactccttttacttcttcctccacttctttaacttccactcctaaaccctctcaacttttcatccatggaaaacgtaaccaaatgttcaaagtttcatgcatggttaccaataataacggtgaccaaaaccaaaacgttgaaacgaattctgttgatcgaagaaatgttcttcttggcttaggtggtctttatggtgttgctaatgctataccattagctgcatccgctactccatctccacctcctgatctctcgtcttgtagtatagccaggattaacgaaactcatgtggtgccgtacagttgttgcgcgcctaagcctgatgatatggagaaagttccgtattacaagttcccttctatgactaagctccgtcagcctgctcatgaagctaatgaggagtatattgccaagtacaatttggcggttagcaagatgagggatcttgataagacacaacctttaagccctatt

SEQ ID NO: 168 - DNA, 514 bp, Artificial
  Mutation introduced by TALE nuclease pair POT32_T02 within a POT32 allele
gcaagcttgtgcaatagttgtagtacatccctcaaaactccttttacttcttcctccacttctttaacttccactcctaaaccctctcaacttttcatccatggaaaacgtaaccaaatgttcaaagtttcatgcatggttaccaataataacggtgaccaaaaccaaaacgttgaaacgaattctgttgatcgaagaaatgttcttcttggcttaggtggtctttatggtgttgctaatgctataccattagctgcatccgctactccatctccacctcctgatctctcgtcttgtagtatagccaggattaacgaaaatcaggtggtgccgtacagttgttgcgcgcctaagcctgatgatatggagaaagttccgtattacaagttcccttctatgactaagctccgtcagcctgctcatgaagctaatgaggagtatattgccaagtacaatttggcggttagcaagatgagggatcttgataagacacaacctttaaaccctattggtt

SEQ ID NO: 169 - DNA, 512 bp, Artificial
  Mutation introduced by TALE nuclease pair POT32_T02 within a POT32 allele
gcaagcttgtgcaatagtagtagtacatctctcaaaactccttttacttcttcctccacttctttatcttccactcctaagccctctcaacttttcatccatggaaaacgtaaccaaatgttcaaagtttcatgcaaggttaccaataataacggtgaccaaaaccaaaacgttgaaacaaattctgttgatcgaagaaatgttcttcttggcttaggtggtctttatggtgttgctaatgctataccattagctgcatccgctgctccagctccacctcctgatctctcgtcttgtagtatagccaggattaacgaaaatcaggtggtgccgtacagttgttgcgcgcctaagcctgatgatatggagaaagttccgtattacaagttcccttctatgactaagcggtcagcctgctcatgaagctaatgaggagtatattgccaagtacaatctggcgattagtcgaatgaaagatcttgataagacacaacctttaaaccctattggtt

SEQ ID NO: 170 - DNA, 506 bp, Artificial
  Mutation introduced by TALE nuclease pair POT32_T02 within a POT32 allele
gcaagcttgtgcaatagtagtagtacatctctcaaaactccttttacttcttcctccacttctttatcttccactcctaagcccctctcaacttttcatccatggaaaacgtaaccaaatgttcaaagtttcatgcaaggttatcaataataacggtgaccaaaacgttgaaacgaattctgttgatcgaagaaatgttcttcttggcttaggtggtctttatggtgttgctaatgctataccattagctgcatccgctgctccaactccacctcctgatctctcgtcttgtagtatagccaggattaacgaaaatcaggtggtgccgtacagttgttgcgcgcctaagcctgatgatatggagaaagttccgtattacaagttcccttctatgactaagctccgtcctgctcatgaagctaatgaggagtatattgccaagtacaatctggcgattagtcgaatgagagatcttgataagacacaacctttaaaccctattggtt

SEQ ID NO: 171 - DNA, 505 bp, Artificial
  Mutation introduced by TALE nuclease pair POT32_T02 within a POT32 allele
gcaagcttgtgcaatagtagtagtacatctctcaaaactccttttacttcttcctccacttctttatcttccactcctaagccctctcaacttttcatccatggaaaacgtaaccaaatgttcaaagtttcatgcaaggttatcaataataacggtgaccaaaacgttgaaacgaattctgttgatcgaagaaatgttcttcttggcttaggtggtctttatggtgttgctaatgctataccattagctgcatccgctgctccaactccacctcctgatctctcgtcttgtagtatagccaggattaacgaaaatcaggtggtgccgtacagttgttgcgcgcctaagcctgatgatatggagaaagttccgtattacaagttcccttctatgactaagctccagcctgctcatgaagctaatgaggagtatattgccaagtacaatctggcgattagtcgaatgagagatcttgataagacacaacctttaaaccctattggtt

SEQ ID NO: 172 - DNA, 514 bp, Artificial
  Mutation introduced by TALE nuclease pair POT32_T02 within a POT32 allele
gcaagcttgtgcaatagtagtagtacatctctcaaaactccttttacttcttcctccacttctttatcttccactcctaagccctctcaacttttcatccatggaaaacgtaaccaaatgttcaaagtttcatgcaaggttaccaataataacggtgaccaaaaccaaaacgttgaaacgaattctgttgatcgaagaaatgttcttcttggcttaggtggtctttatggtgttgctaatgctataccattagctgcatccgctgctccagctccacctcctgatctctcgtcttgtagtatagccaggattaacgaaaatcaggtggtgccgtacagttgttgcgcgcctaagcctgatgatatggagaaagttccgtattacaagttcccttctatgactaagctccgtcagcctgctcatgaagctaatgaggagtatattgccaagtacaatttggcggttagcaagatgagggatcttgataagacacaacctttaaaccctattggtt

SEQ ID NO: 173 - DNA, 513 bp, Artificial
  Mutation introduced by TALE nuclease pair POT32_T02 within a POT32 allele
gcaagcttgtgcaatagtagtagtacatctctcaaaactccttttacttcttcctccacttctttatcttccactcctaagccctctcaacttttcatccatggaaaacgtaaccaaatgttcaaagtttcatgcaaggttaccaataataacggtgaccaaaaccaaaacgttgaaacgaattctgttgatcgaagaaatgttcttcttggcttaggtggtctttatggtgttgctaatgctataccattagctgcatccgctgctccagctccacctcctgatctctcgtcttgtagtatagccaggattaacgaaaatcaggtggtgccgtacagttgttgcgcgcctaagcctgatgatatggagaaagttccgtattacaagttcccttctatgactaagctccgcagcctgctcatgaagctaatgaggagtatattgccaagtacaatttggcggttagcaagatgagggatcttgataagacacaacctttaaaccctattggtt

SEQ ID NO: 174 - DNA, 499 bp, Artificial
  Mutation introduced by TALE nuclease pair POT32_T02 within a POT32 allele
gcaagcttgtgcaatagtagtagtacatctctcaaaactccttttacttcttcctccacttctttatcttccactcctaagccctctcaacttttcatccatggaaaacgtaaccaaatgttcaaagtttcatgcaaggttaccaataataacggtgaccaaaaccaaaacgttgaaacaaattctgttgatcgaagaaatgttcttcttggcttaggtggtctttatggtgttgctaatgctataccattagctgcatccgctgctccagctccacctcctgatctctcgtcttgtagtatagccaggattaacgaaaatcaggtggtgccgtacagttgttgcgcgcctaagcctgatgatatggagaaagttccgtattacaagttcccttctatgactcagcctgctcatgaagctaatgaggagtatattgccaagtacaatctggcgattagtcgaatgaaagatcttgataagacacaacctttaaacccta

SEQ ID NO: 175 - DNA, 506 bp, Artificial
  Mutation introduced by TALE nuclease pair POT32_T02 within a POT32 allele
gcaagcttgtgcaatagtagtagtacatctctcaaaactccttttacttcttcctccacttctttatcttccactcctaagccctctcaacttttcatccatggaaaacgtaaccaaatgttcaaagtttcatgcaaggttatcaataataacggtgaccaaaacgttgaaacgaattctgttgatcgaagaaatgttcttcttggcttaggtggtctttatggtgttgctaatgctataccattagctgcatccgctgctccaactccacctcctgatctctcgtcttgtagtatagccaggattaacgaaaatcaggtggtgccgtacagttgttgcgcgcctaagcctgatgatatggagaaagttccgtattacaagttcccttctatgactaagctccgagcctgctcatgaagctaatgaggagtatattgccaagtacaatctggcgattagtcgaatgagagatcttgataagacacaacctttaaaccctattggtt

SEQ ID NO: 176 - DNA, 476 bp, Artificial
  Mutation introduced by TALE nuclease pair POT32_T02 within a POT32 allele
gcaagcttgtgcaatagtagtagtacatccctcaaaactccttttacttcttcctccacttctttaacttccactcctaaaccctctcaacttttcatccatggaaaacgtaaccaaatgttcaaagtttcatgcatggttaccaataataacggtgaccaaaaccaaaacgttgaaacgaattctgttgatcgaagaaatgttcttcttggcttaggtggtctttatggtgttgctaatgctataccattagctgcatccgctactccatctccacctcctgatctctcgtcttgtagtatagccaggattaacgaaactcatgtggtgccgtacagttgttgcgcgcctaagcctgatgatatggagaaagttctcagcctgctcatgaagctaatgaggagtatattgccaagtacaatttggcggttagcaagatgagggatcttgataagacacaacctttaaaccctatt

SEQ ID NO: 177 - DNA, 462 bp, Artificial
  Mutation introduced by TALE nuclease pair POT32_T02 within a POT32 allele
gcaagcttgtgcaatagtagtagtacatctctcaaaactccttttacttcttcctccacttctttatcttccactcctaagcccctctcaacttttcatccatggaaaacgtaaccaaatgttcaaagtttcatgcaaggttatcaataataacggtgaccaaaacgttgaaacgaattctgttgatcgaagaaatgttcttcttggcttaggtggtctttatggtgttgctaatgctataccattagctgcatccgctgctccaactccacctcctgatctctcgtcttgtagtatagccaggattaacgaaaatcaggtggtgccgtacagttgttgcgcgcctaagcctgatgatatggagaaagttccgtattagcctgctcatgaagctaatgaggagtatattgccaagtacaatctggcgattagtcgaatgagagatcttgataagacacaacc

SEQ ID NO: 178 - DNA, 473 bp, Artificial
  Mutation introduced by TALE nuclease pair POT32_T02 within a POT32 allele
  misc_feature (156): n is a or c or t or g
gcaagcttgtgcaatagttgtagtacatcctcaaaactccttttacttcttcctccacttctttaacttccactcctaaaccctctcaacttttcatccatggaaacgtaaccaaatgttcaaagtttcatgcatggttaccaataataacggtgnccaaaaccaaaacgttgaaacgaattctgttgatcgaagaaatgttcttcttggcttaggtggtctttatggtgttgctaatgctataccattagctgcatccgctactccatctccacctcctgatctctcgtcttgtagtatagccaggattaacgaaactcatgtggtgccgtacagttgttgcgcgcctaagcctgatgatatggagaaagttccgtattacaagttcccttctatgactaagctccgtcagcctgctcatgaagctaatgaggagtatattgccaagtacaatttggcggttagcaagatga

SEQ ID NO: 179 - DNA, 517 bp, Artificial
  Mutation introduced by TALE nuclease pair POT32_T02 within a POT32 allele
gcaagcttgtgcaatagtagtagtacatctctcaaaactccttttacttcttcctccacttctttatcttccactcctaacgcctctcaacttttcatccatggaaaacgtaaccaaatgttcaaagtttcatgcaaggttaccaataataacggtgaccaaaaccaaaacgttgaaacgaattctgttgatcgaagaaatgttcttcttggcttaggtggtctttatggtgttgctaatgctataccattagctgcatccgctgctccagctccacctcctgatctctcgtcttgtagtatagccaggattaacgaaaatcagtggtgccgtacagttgttgcgcgcctaagcctgatgatatggagaaagttccgtattacaagttcccttctatgactaagctccgtcgtgcagcctgctcatgaagctaatgaggagtatattgccaagtacaatctggcgattagtcgaatgaaagatcttgataagacacaacctttaaaccctattggtt

SEQ ID NO: 180 - DNA, 454 bp, Artificial
  Mutation introduced by TALE nuclease pair POT32_T02 within a POT32 allele
gcaagcttgtgcaatagtagtagtacatctctcaaaactccttttacttcttcctccacttctttatcttccactcctaagccctctcaacttttcatccatggaaaacgtaaccaaatgttcaaagtttcatgcaaggttaccaataataacggtgaccaaaaccaaaacgttgaaacaaattctgttgatcgaagaaatgttcttcttggcttaggtggtctttatggtgttgctaatgctataccattagctgcatccgctgctccagctccacctcctgatctctcgtcttgtagtatagccaggattaacgaaaatcaggtggtgccgtacagttgttgcgcgcctaagcctgatgatatcgtcagcctgctcatgaagctaatgaggagtatattgccaagtacaatctggcgattagtcgaatgaaagatcttgataagacacaacc

SEQ ID NO: 181 - DNA, 511 bp, Artificial
  Mutation introduced by TALE nuclease pair POT32_T02 within a POT32 allele
gcaagcttgtgcaatagtagtagtacatctctcaaaactccttttacttcttcctccacttctttatcttccactcctaagccctctcaacttttcatccatggaaaacgtaaccaaatgttcaaagtttcatgcaaggttaccaataataacggtgaccaaaaccaaaacgttgaaacgaattctgttgatcgaagaaatgttcttcttggcttaggtggtttttatggtgttgctaatgctataccattagctgcatccgctactccatctccacctcctgatctctcgtcttgtagtatagccaggattaacgaaactcatgtggtgccgtacagttgttgcgcgcctaagcctgatgatatggagaaagttccgtattacaagttcccttctatgactaagctccagcctgctcatgaagctaatgaggagtatattgccaagtacaatttggcggttagcaagatgagggatcttgataagacacaacctttaaaccctattggtt

SEQ ID NO: 182 - DNA, 497 bp, Artificial
  Mutation introduced by TALE nuclease pair POT32_T02 within a POT32 allele
gcaagcttgtgcaatagtagtagtacatctctcaaaactccttttacttcttcctccacttctttatcttccactcctaagcccctctcaacttttcatccatggaaaacgtaaccaaatgttcaaagtttcatgcaaggttatcaataataacggtgaccaaaacgttgaaacgaattctgttgatcgaagaaatgttcttcttggcttaggtggtctttatggtgttgctaatgctataccattagctgcatccgctgctccaactccacctcctgatctctcgtcttgtagtatagccaggattaacgaaaatcaggtggtgccgtacagttgttgcgcgcctaagcctgatgatatggagaaagttccgtattacaagttcccttctatgactaagcagcctgctcatgaagctaatgaggagtatattgccaagtacaatctggcgattagtcgaatgagagatcttgataagacacaacctttaaacccta

SEQ ID NO: 183 - DNA, 510 bp, Artificial
  Mutation introduced by TALE nuclease pair POT32_T02 within a POT32 allele
gcaagcttgtgcaatagtagtagtacatctctcaaaactccttttacttcttcctccacttctttatcttccactcctaagcccctctcaacttttcatccatggaaaacgtaaccaaatgttcaaagtttcatgcaaggttatcaataataacggtgaccaaaacgttgaaacgaattctgttgatcgaagaaatgttcttcttggcttaggtggtctttatggtgttgctaatgctataccattagctgcatccgctgctccaactccacctcctgatctctcgtcttgtagtatagccaggattaacgaaaatcaggtggtgccgtacagttgttgcgcgcctaagcctgatgatatggagaaagttccgtattacaagttcccttctatgactaagctccgttcagcctgctcatgaagctaatgaggagtatattgccaagtacaatctggcgattagtcgaatgagagatcttgataagacacaacctttaaaccctattggtt

SEQ ID NO: 184 - DNA, 509 bp, Artificial
  Mutation introduced by TALE nuclease pair POT32_T02 within a POT32 allele
gcaagcttgtgcaatagtagtagtacatctctcaaaactccttttacttcttcctccacttctttatcttccactcctaagcccctctcaacttttcatccatggaaaacgtaaccaaatgttcaaagtttcatgcaaggttatcaataataacggtgaccaaaacgttgaaacgaattctgttgatcgaagaaatgttcttcttggcttaggtggtctttatggtgttgctaatgctataccattagctgcatccgctgctccaactccacctcctgatctctcgtcttgtagtatagccaggattaacgaaaatcaggtggtgccgtacagttgttgcgcgcctaagcctgatgatatggagaaagttccgtattacaagttcccttctatgactaagctccgtcagcctgctcatgaagctaatgaggagtatattgccaagtacaatttggcggttagcaagatgagggatcttgataagacacaacctttaaaccctattggtt

SEQ ID NO: 185 - DNA, 506 bp, Artificial
  Mutation introduced by TALE nuclease pair POT32_T02 within a POT32 allele
gcaagcttgtgcaatagtagtagtacatctctcaaaactccttttacttcttcctccacttctttatcttccactcctaagcccctctcaacttttcatccatggaaaacgtaaccaaatgttcaaagtttcatgcaaggttatcaataataacggtgaccaaaacgttgaaacgaattctgttgatcgaagaaatgttcttcttggcttaggtggtctttatggtgttgctaatgctataccattagctgcatccgctgctccaactccacctcctgatctctcgtcttgtagtatagccaggattaacgaaaatcaggtggtgccgtacagttgttgcgcgcctaagcctgatgatatggagaaagttccgtattacaagttcccttctatgactaagcttcagcctgctcatgaagctaatgaggagtatattgccaagtacaatctggcgattagtcgaatgagagatcttgataagacacaacctttaaaccctattggtt

SEQ ID NO: 186 - DNA, 509 bp, Artificial
  Mutation introduced by TALE nuclease pair POT32_T02 within a POT32 allele
gcaagcttgtgcaatagtagtagtacatctctcaaaactccttttacttcttcctccacttctttatcttccactcctaagccctctcaactttcatccatggaaacgtaaccaaatgttcaaagtttcatgcaaggttaccaataataacggtgaccaaaaccaaaacgttgaaacaaattctgttgatcgaagaaatgttcttcttggcttaggtggtctttatggtgttgctaatgctataccattagctgcatccgctgctccagctccacctcctgatctctcgtcttgtagtatagccaggattaacgaaaatcaggtggtgccgtacagttgttgcgcgcctaagcctgatgatatggagaaagttccgtattacaagttcccttctatgactaagctccagcctgctcatgaagctaatgaggagtatattgccaagtacaatttggcggttagcaagatgagggatcttgataagacacaacctttaaaccctattggtt

SEQ ID NO: 187 - DNA, 515 bp, Artificial
  Mutation introduced by TALE nuclease pair POT32_T02 within a POT32 allele
gcaagcttgtgcaatagtagtagtacatctctcaaaactccttttacttcttcctccacttctttatcttccactcctaagccctctcaacttttcatccatggaaaacgtaaccaaatgttcaaagtttcatgcaaggttaccaataataacggtgaccaaaaccaaaacgttgaaacgaattctgttgatcgaagaaatgttcttcttggcttaggtggtctttatggtgttgctaatgctataccattagctgcatccgctgctccagctccacctcctgatctctcgtcttgtagtatagccaggattaacgaaaatcaggtggtgccgtacagttgttgcgcgcctaagcctgatgatatggagaaagttccgtattacaagttcccttctatgactaagctccgtcagcctgctcatgaagctaatgaggagtatattgccaagtacaatttggcggttagcaagatgaggggatcttgataagacacaacctttaaaccctattggtt

SEQ ID NO: 188 - DNA, 459 bp, Artificial
  Mutation introduced by TALE nuclease pair POT32_T02 within a POT32 allele
gcaagcttgtgcaatagtagtagtacatctctcaaaactccttttacttcttcctccacttctttatcttccactcctaagcccctctcaacttttcatccatggaaaacgtaaccaaatgttcaaagtttcatgcaaggttaccaataataacggtgaccaaaaccaaaacgttgaaacgaattctgttgatcgaagaaatgttcttcttggcttaggtggtctttatggtgttgctaatgctataccattagctgcatccgctgctccagctccacctcctgatctctcgtcttgtagtatagccaggattaacgaaaatcaggtggtgccgtacagttgttgcgcgcctaagcctgatgatatggagaaagttccgtattacaagttcccttctatgactaagctccgtcagcctgctcatgaagctaatgaggagtatattgccaagtacaattt

SEQ ID NO: 189 - DNA, 498 bp, Artificial
  Mutation introduced by TALE nuclease pair POT32_T02 within a POT32 allele
gcaagcttgtgcaatagtagtagtacatctctcaaaactccttttacttcttcctccacttctttatcttccactcctaagccctctcaacttttcatccatggaaaacgtaaccaaatgttcaaagtttcatgcaaggttaccaataataacggtgaccaaaaccaaaacgttgaaacaaattctgttgatcgaagaaatgttcttcttggcttaggtggtctttatggtgttgctaatgctataccattagctgcatccgctgctccagctccacctcctgatctctcgtcttgtagtatagccaggattaacgaaaatcaggtggtgccgtacagttgttgcgcgcctaagcctgatgatatggagaaagttccgtattacaagttcccttctatgactaagctccgtctgctgcctctatgaagctaatgaggagtatattgccaagtacaatctggcgattagtcgaatgaaagatcttgataagacacaacc

SEQ ID NO: 190 - DNA, 513 bp, Artificial
  Mutation introduced by TALE nuclease pair POT32_T02 within a POT32 allele
gcaagcttgtgcaatagtagtagtacatctctcaaaactccttttacttcttcctccacttctttatcttccactcctaagcccctctcaacttttcatccatggaaaacgtaaccaaatgttcaaagtttcatgcaaggttaccaataataacggtgaccaaaaccaaaacgttgaaacaaattctgttgatcgaagaaatgttcttcttggcttaggtggtctttatggtgttgctaatgctataccattagctgcatccgctgctccagctccacctcctgatctctcgtcttgtagtatagccaggattaacgaaaatcaggtggtgccgtacagttgttgcgcgcctaagcctgatgatatggagaaagttccgtattacaagttcccttctatgactaagcttcagcctgctcatgaagctaatgaggagtatattgccaagtacaatttggcggttagcaagatgaggggatcttgataagacacaacctttaaaccctattggtt

SEQ ID NO: 191 - DNA, 502 bp, Artificial
  Mutation introduced by TALE nuclease pair POT32_T02 within a POT32 allele
gcaagcttgtgcaatagttgtagtacatccctcaaaactccttttacttcttcctccacttctttaacttccactcctaaaccctctcaacttttcatccatggaaaacgtaaccaaatgttcaaagtttcatgcatggttaccaataataacggtgaccaaaaccaaaacgttgaaacgaattctgttgatcgaagaaatgttcttcttggcttaggtggtctttatggtgttgctaatgctataccattagctgcatccgctactccatctccacctcctgatctctcgtcttgtagtatagccaggattaacgaaactcatgtggtgccgtacagttgttgcgcgcctaagcctgatgatatggagaaagttccgtattacaagttcccttctatgactaagctccgtgctcatgaagctaatgaggagtatattgccaagtacaatttggcggttagcaagatgagggatcttgataagacacaacctttaaacccta

SEQ ID NO: 192 - DNA, 505 bp, Artificial
  Mutation introduced by TALE nuclease pair POT32_T02 within a POT32 allele
gcaagcttgtgcaatagtagtagtacatctctcaaaactccttttacttcttcctccacttctttatcttccactcctaagcccctctcaacttttcatccatggaaaacgtaaccaaatgttcaaagtttcatgcaaggttatcaataataacggtgaccaaaacgttgaaacgaattctgttgatcgaagaaatgttcttcttggcttaggtggtctttatggtgttgctaatgctataccattagctgcatccgctactccatctccacctcctgatctctcgtcttgtagtatagccaggattaacgaaactcatgtggtgccgtacagttgttgcgcgcctaagcctgatgatatggagaaagttccgtattacaagttcccttctatgactaagctcagcctgctcatgaagctaatgaggagtatattgccaagtacaatttggcggttagcaagatgagggatcttgataagacacaacctttaaaccctattggtt

SEQ ID NO: 193 - DNA, 516 bp, Artificial
  Mutation introduced by TALE nuclease pair POT32_T02 within a POT32 allele
gcaagcttgtgcaatagtagtagtacatctctcaaaactccttttacttcttcctccacttctttacttccactcctaagccctctcaacttttcatccatggaaaacgtaaccaaatgttcaaagtttcatgcaaggttaccaataataacggtgaccaaaaccaaaacgttgaaacaaattctgttgatcgaagaaatgttcttcttggcttaggtggtctttatggtgttgctaatgctataccattagctgcatccgctgctccagctccacctcctgatctctcgtcttgtagtatagccaggattaacgaaaatcaggtggtgccgtacagttgttgcgcgcctaagcctgatgatatggagaaagttccgtattacaagttcccttctatgactaagctccgtcgtgcgcctgctcatgaagctaatgaggagtatattgccaagtacaatctggcgattagtcgaatgaaagatcttgataagacacaacctttaaaccctattggtt

SEQ ID NO: 194 - DNA, 509 bp, Artificial
  Mutation introduced by TALE nuclease pair POT32_T02 within a POT32 allele
gcaagcttgtgcaatagtagtagtacatctctcaaaactccttttacttcttcctccacttctttatcttccactcctaagccctctcaacttttcatccatggaaaacgtaaccaaatgttcaaagtttcatgcaaggttaccaataataacggtgaccaaaaccaaaacgttgaaacgaattctgttgatcgaagaaatgttcttcttggcttaggtggtctttatggtgttgctaatgctataccattagctgcatccgctgctccagctccacctcctgatctctcgtcttgtagtatagccaggatttaacgaaaatcaggtggtgccgtacagttgttgcgcgcctaagcctgatgatatggagaaagttccgtattacaagttcccttctatgactaagctccgttcagcctgctcatgaagctaatgaggagtatattgccaagtacaatttggcggttagcaagatgaggggatcttgataagacacaacctttaaaccc

SEQ ID NO: 195 - DNA, 516 bp, Artificial
  Mutation introduced by TALE nuclease pair POT32_T02 within a POT32 allele
gcaagcttgtgcaatagttgtagtacatccctcaaaactccttttacttcttcctccacttctttatcttccacctcctaacgccctctcaacttttcatccatggaaaacgtaaccaaatgttcaaagtttcatgcaaggttaccaataataacggtgaccaaaaccaaaacgttgaaacgaattctgttgatcgaagaaatgttcttcttggcttaggtggtctttatggtgttgctaatgctataccattagctgcatccgctgctccagctccacctcctgatctctcgtcttgtagtatagccaggattaacgaaaatcaggtggtgccgtacagttgttgcgcgcctaagcctgatgatatggagaaagttccgtattacaagttcccttctatgactaagctccgtcagcctgctcatgaagctaatgaggagtatattgccaagtacaatttggcggttagcaagatgagggatcttgataagacacaacctttaaaccctattggtt

SEQ ID NO: 196 - DNA, 502 bp, Artificial
  Mutation introduced by TALE nuclease pair POT32_T02 within a POT32 allele
gcaagcttgtgcaatagtagtagtacatctctcaaaactccttttacttcttcctccacttctttatcttccactcctaagccctctcaacttttcatccatggaaaacgtaaccaaatgttcaaagtttcatgcaaggttaccaataataacggtgaccaaaaccaaaacgttgaaacgaattctgttgatcgaagaaatgttcttcttggcttaggtggtctttatggtgttgctaatgctataccattagctgcatccgctgctccagctccacctcctgatctctcgtcttgtagtatagccaggattaacgaaaatcaggtggtgccgtacagttgttgcgcgcctaagcctgatgatatggagaaagttccgtattacaagttcccttctatgactaagctccgtgttcatgaagctaatgaggagtatattgccaagtacaatttggcggttagcaagatgagggatcttgataagacacaacctttaaacccta

SEQ ID NO: 197 - DNA, 510 bp, Artificial
  Mutation introduced by TALE nuclease pair POT32_T02 within a POT32 allele
gcaagcttgtgcaatagttgtagtacatctctcaaaactccttttacttcttcctccacttctttaacttccactcctaaaccctctcaacttttcatccatggaaaacgtaaccaaatgttcaaagtttcatgcaaggttaccaataataacggtgaccaaaaccaaaacgttgaaacgaattctgttgatcgaagaaatgttcttcttggcttaggtggtctttatggtgttgctaatgctataccattagctgcatccgctactccatctccacctcctgatctctcgtcttgtagtatagccaggattaacgaaactcatgtggtgccgtacagttgttgcgcgcctaagcctgatgatatggagaaagttccgtattacaagttcccttctatgactaagctccgtctgctcatgaagctaatgaggagtatattgccaagtacaatttggcggttagcaagatgagggatcttgataagacacaacctttaaaccctattggtt

SEQ ID NO: 198 - DNA, 493 bp, Artificial
  Mutation introduced by TALE nuclease pair POT32_T02 within a POT32 allele
gcaagcttgtgcaatagtagtagtacatctctcaaaactccttttacttcttcctccacttctttatcttccactcctaagccctctcaacttttcatccatggaaaacgtaaccaaatgttcaaagtttcatgcaaggttaccaataataacggtgaccaaaaccaaaacgttgaaacaaattctgttgatcgaagaaatgttcttcttggcttaggtggtctttatggtgttgctaatgctataccattagctgcatccgctgctccagctccacctcctgatctctcgtcttgtagtatagccaggattaacgaaaatcaggtggtgccgtacagttgttgcgcgcctaagcctgatgatatggagaaagttccgtattacaagttcccttctaagcctgctcatgaagctaatgaggagtatattgccaagtacaatctggcgattagtcgaatgaaagatcttgataagacacaacctttaaacccta

SEQ ID NO: 199 - DNA, 514 bp, Artificial
  Mutation introduced by TALE nuclease pair POT32_T02 within a POT32 allele
gcaagcttgtgcaatagtagtagtacatctctcaaaactccttttacttcttcctccacttctttatcttccactcctaagcccctctcaacttttcatccatggaaaacgtaaccaaatgttcaaagtttcatgcaaggttaccaataataacggtgaccaaaaccaaaacgttgaaacgaattctgttgatcgaagaaatgttcttcttgggcttaggtggtttttatggtgttgctaatgctataccattagctgcatccgctactccatctccacctcctgatctctcgtcttgtagtatagccaggattaacgaaactcatgtggtgccgtacagttgttgcgcgcctaagcctgatgatatggagaaagttccgtattacaagttcccttctatgactaagctccagcctgctcatgaagctaatgaggagtatattgccaagtacaatttggcggttagcaagatgaggggatcttgataagacacaacctttaaaccctattggtt

SEQ ID NO: 200 - DNA, 518 bp, Artificial
  Mutation introduced by TALE nuclease pair POT32_T02 within a POT32 allele
  misc_feature (152): n is a or c or t or g
gcaagcttgtgcaatagtagtagtacatcctcaaaactccttttacttcttcctccacttctttaacttccactcctaaaccctctcaacttttcatccatggaaaacgtaaccaaatgttcaaagtttcatgcagttgctacaataatagnggcgaaccaaaaccaaacgttgaaacgaattctgttgatcgaagaaatgttcttcttggcttaggtggtctttatggtgttgctaatgctataccattagctgcatccgctactccatctccacctcctgatctctcgtcttgtagtatagccaggattaacgaaactcatgtggtgccgtacagttgttgcgcgcctaagcctgatgatatggagaaagttccgtattacaagttcccttctatgactaagctccgtgttcgagcctgctcatgaagctaatgaggagtatattgccaagtacaatttggcggttagcaagatgaggggatcttgataagacacaacctttaaaccctattggtt

SEQ ID NO: 201 - DNA, 415 bp, Artificial
  Mutation introduced by TALE nuclease pair POT32_T02 within a POT32 allele
gcaagcttgtgcaatagtagtagtacatctctcaaaactccttttacttcttcctccacttctttatcttccactcctaagcccctctcaacttttcatccatggaaaacgtaaccaaatgttcaaagtttcatgcaaggttaccaataataacggtgaccaaaaccaaaacgttgaaacaaattctgttgatcgaagaaatgttcttcttggcttaggtggtctttatggtgttgctaatgctataccattagctgcatccgctgctccagctccacctcctgatctctcgtcttgtagtatagccaggattaacgaaaatcaggtggtgccgtacagttgttgcgcgcctaagcctgatgatatggagaaagatgagggatcttgataagacacaacctttaaaccctattgg

SEQ ID NO: 202 - DNA, 480 bp, Artificial
  Mutation introduced by TALE nuclease pair POT32_T02 within a POT32 allele
gcaagcttgtgcaatagttgtagtacatccctcaaaactccttttacttcttcctccacttctttatcttccactcctaagccctctcaacttttcatccatggaaaacgtaaccaaatgttcaaagtttcatgcaaggttaccaataataacggtgaccaaaaccaaaacgttgaaacaaattctgttgatcgaagaaatgttcttcttggcttaggtggtctttatggtgttgctaatgctataccattagctgcatccgctgctccagctccacctcctgatctctcgtcttgtagtatagccaggattaacgaaaatcaggtggtgccgtacagttgttgcgcgcctaagcctgatgatatggagaaagttccgtattacaagttcccttctatgactaagctcgtcgtgcgcctgctcatgaagctaatgaggagtatattgccaagtacaatctggcgattagtcgaatgaaag

SEQ ID NO: 203 - DNA, 489 bp, Artificial
  Mutation introduced by TALE nuclease pair POT32_T02 within a POT32 allele
gcaagcttgtgcaatagtagtagtacatctctcaaaactccttttacttcttcctccacttctttatcttccactcctaagccctctcaacttttcatccatggaaaacgtaaccaaatgttcaaagtttcatgcaaggttaccaataataacggtgaccaaaaccaaaacgttgaaacaaattctgttgatcgaagaaatgttcttcttggcttaggtggtctttatggtgttgctaatgctataccattagctgcatccgctgctccagctccacctcctgatctctcgtcttgtagtatagccaggattaacgaaaatcaggtggtgccgtacagttgttgcgcgcctaagcctgatgatatggagaaagttccgtattacaagttcccttctatgactaagctccctgctcatgaagctaatgaggagtatattgccaagtacaatttggcggttagcaagatgagggatcttgataagacacaa

SEQ ID NO: 204 - DNA, 495 bp, Artificial
  Mutation introduced by TALE nuclease pair POT32_T02 within a POT32 allele
gcaagcttgtgcaatagtagtagtacatctctcaaaactccttttacttcttcctccacttctttaacttccactcctaagccctctcaacttttcatccatggaaaacgtaaccaaatgttcaaagtttcatgcaaggttaccaataataacggtgaccaaaaccaaaacgttgaaacaaattctgttgatcgaagaaatgttcttcttggcttaggtggtctttatggtgttgctaatgctataccattagctgcatccgctgctccagctccacctcctgatctctcgtcttgtagtatagccaggattaacgaaaatcaggtggtgccgtacagttgttgcgcgcctaagcctgatgatatggagaaagttccgtattacaagttcccttctatgactaagctccggtcatgcctgcctcatgaagctaatgaggagtatattgccaagtacaatctggcgattagtcgaatgaaagatcttgataagaca

SEQ ID NO: 205 - DNA, 512 bp, Artificial
  Mutation introduced by TALE nuclease pair POT32_T02 within a POT32 allele
gcaagcttgtgcaatagtagtagtacatctctcaaaactccttttacttcttcctccacttctttatcttccactcctaagccctctcaacttttcatccatggaaaacgtaaccaaaatgttcaaagtttcatgcaaggttaccaataataacggtgaccaaaaccaaaacgttgaaacgaattctgttgatcgaagaaatgttcttcttggcttaggtggtttttatggtgttgctaatgctataccattagctgcatccgctactccatctccacctcctgatctctcgtcttgtagtatagccaggattaacgaaactcatgtggtgccgtacagttgttgcgcgcctaagcctgatgatatggagaaagttccgtattacaagttcccttctatgactaagctccagcctgctcatgaagctaatgaggagtatattgccaagtacaatttggcggttagcaagatgagggatcttgataagacacaacctttaaaccctattggtt

SEQ ID NO: 206 - DNA, 484 bp, Artificial
  Mutation introduced by TALE nuclease pair POT32_T02 within a POT32 allele
gcaagcttgtgcaatagtagtagtacatctctcaaaactccttttacttcttcctccacttctttatcttccactcctaagccctctcaacttttcatccatggaaaacgtaaccaaatgttcaaagtttcatgcaaggttatcaataataacggtgaccaaaacgttgaaacgaattctgttgatcgaagaaatgttcttcttggcttaggtggtctttatggtgttgctaatgctataccattagctgcatccgctactccagctccacctcctgatctctcatcttgtagtaaagcaaagattatgaaactacggaggtgccatacagttgttgcgctcccacgccaaaagatatgaagaaagttccatattacaagttcccttctatgactaagctcagcctgctcatgaagctaatgaggagtatattgccaagtacaatctggcgattagtcgaatgaaagatcttgataagacacaa

SEQ ID NO: 207 - DNA, 514 bp, Artificial
  Mutation introduced by TALE nuclease pair POT32_T02 within a POT32 allele
gcaagcttgtgcaatagttgtagtacatccctcaaaactccttttacttcttcctccacttctttaacttccactcctaaaccctctcaacttttcatccatggaaaacgtaaccaaatgttcaaagtttcatgcatggttaccaataataacggtgaccaaaaccaaaacgttgaaacgaattctgttgatcgaagaaatgttcttcttggcttaggtggtctttatggtgttgctaatgctataccattagctgcatccgctactccatctccacctcctgatctctcgtcttgtagtatagccaggattaacgaaactcatgtggtgccgtacagttgttgcgcgcctaagcctgatgatatggagaaagttccgtattacaagttcccttctatgactaagctccgtcagcctgctcatgaagctaatgaggagtatattgccaagtacaatttggcggttagcaagatgagggatcttgataagacacaacctttaaaccctattggtt

SEQ ID NO: 208 - DNA, 475 bp, Artificial
  Mutation introduced by TALE nuclease pair POT32_T02 within a POT32 allele
gcaagcttgtgcaatagtagtagtacatctctcaaaactccttttacttcttcctccacttctttatcttccactcctaagccctctcaacttttcatccatggaaaacgtaaccaaatgttcaaagtttcatgcaaggttaccaataataacggtgaccaaaaccaaaacgttgaaacgaattctgttgatcgaagaaatgttcttcttggcttaggtggtctttatggtgttgctaatgctataccattagctgcatccgctgctccagctccacctcctgatctctcgtcttgtagtatagccaggattaacgaaaatcaggtggtgccgtacagttgttgcgcgcctaagcctgatgatatggagaaagttccgtattacaagttcccttctatgactaagctccgtcagcctgctcatgaagctaatgaggagtatattgccaagtacaatttggcggttagcaagatga

SEQ ID NO: 209 - DNA, 489 bp, Artificial
  Mutation introduced by TALE nuclease pair POT32_T02 within a POT32 allele
gcaagcttgtgcaatagttgtagtacatccctcaaaactccttttacttcttcctccacttctttaacttccactcctaaaccctctcaacttttcatccatggaaaacgtaaccaaatgttcaaagtttcatgcatggttaccaataataacggtgaccaaaaccaaaacgttgaaacgaattctgttgatcgaagaaatgttcttcttggcttaggtggtctttatggtgttgctaatgctataccattagctgcatccgctactccatctccacctcctgatctctcgtcttgtagtatagccaggattaacgaaactcatgtggtgccgtacagttgttgcgcgcctaagcctgatgatatggagaaagttccgtattacaagttcccttctatgactaagctccgtgctcatgaagctaatgaggagtatattgccaagtacaatttggcggttagcaagatgagggatcttgataagacacaa

SEQ ID NO: 210 - DNA, 511 bp, Artificial
  Mutation introduced by TALE nuclease pair POT32_T02 within a POT32 allele
gcaagcttgtgcaatagtagtagtacatctctcaaaactccttttacttcttcctccacttctttatcttccactcctaagccctctcaacttttcatccatggaaaacgtaaccaaatgttcaaagtttcatgcaaggttaccaataataacggtgaccaaaaccaaaacgttgaaacaaattctgttgatcgaagaaatgttcttcttggcttaggtggtctttatggtgttgctaatgctataccattagctgcatccgctgctccagctccacctcctgatctctcgtcttgtagtatagccaggattaacgaaaatcaggtggtgccgtacagttgttgcgcgcctaagcctgatgatatggagaaagttccgtattacaagttcccttctatgactaagcgggtcagcctgctcatgaagctaatgaggagtatattgccaagtacaatctggcgattagtcgaatgaaagatcttgataagacacaacctttaaaccctattgg

SEQ ID NO: 211 - DNA, 507 bp, Artificial
  Mutation introduced by TALE nuclease pair POT32_T02 within a POT32 allele
gcaagcttgtgcaatagtagtagtacatctctcaaaactccttttacttcttcctccacttctttatcttccactcctaagcccctctcaacttttcatccatggaaaacgtaaccaaatgttcaaagtttcatgcaaggttatcaataataacggtgaccaaaacgttgaaacgaattctgttgatcgaagaaatgttcttcttggcttaggtggtctttatggtgttgctaatgctataccattagctgcatccgctgctccaactccacctcctgatctctcgtcttgtagtatagccaggattaacgaaaatcaggtggtgccgtacagttgttgcgcgcctaagcctgatgatatggagaaagttccgtattacaagttcccttctatgactaagctccgagcctgctcatgaagctaatgaggagtatattgccaagtacaatctggcgattagtcgaatgagagatcttgataagacacaacctttaaaccctattggtt

SEQ ID NO: 212 - DNA, 497 bp, Artificial
  Mutation introduced by TALE nuclease pair POT32_T02 within a POT32 allele
gcaagcttgtgcaatagtagtagtacatctctcaaaactccttttacttcttcctccacttctttaacttccactcctaagccctctcaacttttcatccatggaaaacgtaaccaaatgttcaaagtttcatgcaaggttaccaataataacggtgaccaaaaccaaaacgttgaaacgaattctgttgatcgaagaaatgttcttcttggcttaggtggtctttatggtgttgctaatgctataccattagctgcatccgctgctccagctccacctcctgatctctcgtcttgtagtatagccaggattaacgaaaatcaggtggtgccgtacagttgttgcgcgcctaagcctgatgatatggtgaaagttccgtattacaagttcccttctatgacagcctgctcatgaagctaatgaggagtatattgccaagtacaatttggcggttagcaagatgagggatcttgataagacacaacctttaaacccta

SEQ ID NO: 213 - DNA, 475 bp, Artificial
  Mutation introduced by TALE nuclease pair POT32_T02 within a POT32 allele
gcaagcttgtgcaatagtagtagtacatctctcaaaactccttttacttcttcctccacttctttatcttccactcctaagccctctcaacttttcatccatggaaaacgtaaccaaatgttcaaagtttcatgcaaggttaccaataataacggtgaccaaaaccaaaacgttgaaacgaattctgttgatcgaagaaatgttcttcttggcttaggtggtctttatggtgttgctaatgctataccattagctgcatccgctgctccagctccacctcctgatctctcgtcttgtagtatagccaggattaacgaaaatcaggtggtgccgtacagttgttgcgcgcctaagcctgatgatatggagaaagttccgtattacaagttcccttctatgactaagctctgtcagcctgctcatgaagctaatgaggagtatattgccaagtacaatttggcggttagcaagatga

SEQ ID NO: 214 - DNA, 496 bp, Artificial
  Mutation introduced by TALE nuclease pair POT32_T02 within a POT32 allele
gcaagcttgtgcaatagtagtagtacatctctcaaaactccttttacttcttcctccacttctttatcttccactcctaagccctctcaacttttcatccatggaaaacgtaaccaaatgttcaaagtttcatgcaaggttatcaataataacggtgaccaaaacgttgaaacgaattctgttgatcgaagaaatgttcttcttggcttaggtggtctttatggtgttgctaatgctataccattagctgcatccgctgctccaactccacctcctgatctctcgtcttgtagtatagccaggattaacgaaaatcaggtggtgccgtacagttgttgcgcgcctaagcctgatgatatggagaaagttccgtattacaagttcccttctatgactaagcagcctgctcatgaagctaatgaggagtatattgccaagtacaatctggcgattagtcgaatgagagatcttgataagacacaacctttaaacccta

SEQ ID NO: 215 - DNA, 421 bp, Artificial
  Mutation introduced by TALE nuclease pair POT32_T02 within a POT32 allele
gcaagcttgtgcaatagttgtagtacatctctcaaaactccttttacttcttcctccacttctttaacttccactcctaaaccctctcaacttttcatccatggaaaacgtaaccaaatgttcaaagtttcatgcaaggttaccaataataacggtgaccaaaaccaaaacgttgaaacgaattctgttgatcgaagaaatgttcttcttggcttaggtggtctttatggtgttgctaatgctataccattagctgcatccgctactccatctccacctcctgatctctcgtcttgtagtatagccaggattaacgaaactcatgtggtgccgtacagttgttgcgcgccattgccaagtacaatttggcggttagcaagatgagggatcttgataagacacaacctttaaaccctattgg

SEQ ID NO: 216 - DNA, 513 bp, Artificial
  Mutation introduced by TALE nuclease pair POT32_T02 within a POT32 allele
gcaagcttgtgcaatagttgtagtacatccctcaaaactccttttacttcttcctccacttctttatcttccactcctaagccctctcaacttttcatccatggaaaacgtaaccaaatgttcaaagtttcatgcaaggttaccaataataacggtgaccaaaaccaaaacgttgaaacaaattctgttgatcgaagaaatgttcttcttggcttaggtggtctttatggtgttgctaatgctataccattagctgcatccgctgctccagctccacctcctgatctctcgtcttgtagtatagccaggattaacgaaaatcaggtggtgccgtacagttgttgcgcgcctaagcctgatgatatggagaaagttccgtattacaagttcccttctatgactaagctcgtctgcctgctcatgaagctaatgaggagtatattgccaagtacaatctggcgattagtcgaatgaaagatcttgataagacacaacctttaaaccctattggtt

SEQ ID NO: 217 - DNA, 454 bp, Artificial
  Mutation introduced by TALE nuclease pair POT32_T02 within a POT32 allele
  misc_feature (151): n is a or c or t or g
gcaagcttgtgcaatagtagtagtacatctctcaaaactccttttacttcttcctccacttctttaacttccactcctaagccctctcaacttttcatccatggaaaacgtaaccaaatgttcaaagtttcatgcagtgctaatcaataanagtgacgaaccaaaacagttgaaacgaattctgttgatcgaagaaatgttcttcttggcttaggtggtctttatggtgttgctaatgctataccattagctgcatccgctactccatctccacctcctgatctctcgtcttgtagtatagccaggattaacgaaactcatgtggtgccgtacagttgttgcgcgcctaagcctgatgatatggagaaagttccgtattacaagttcccttctatgactaagctccgcgtcagcctgctcatgaagctaatgaggagtatattgccaagtacaa

SEQ ID NO: 218 - DNA, 518 bp, Artificial
  Mutation introduced by TALE nuclease pair POT32_T02 within a POT32 allele
gcaagcttgtgcaatagtagtagtacatctctcaaaactccttttacttcttcctccacttctttacttccactcctaagccctctcaacttttcatccatggaaaacgtaaccaaatgttcaaagtttcatgcaaggttaccaataataacggtgaccaaaaccaaaacgttgaaacaaattctgttgatcgaagaaatgttcttcttggcttaggtggtctttatggtgttgctaatgctataccattagctgcatccgctgctccagctccacctcctgatctctcgtcttgtagtatagccaggattaacgaaaatcaggtggtgccgtacagttgttgcgcgcctaagcctgatgatatggagaaagttccgtattacaagttcccttctatgactaagctccgtctgccagtcctgctcatgaagctaatgaggagtatattgccaagtacaatctggcgattagtcgaatgaaagatcttgataagacacaacctttaaaccctattggtt

SEQ ID NO: 219 - DNA, 435 bp, Artificial
  Mutation introduced by TALE nuclease pair POT32_T02 within a POT32 allele
gcaagcttgtgcaatagtagtagtacatctctcaaaactccttttacttcttcctccacttctttatcttccactcctaagccctctcaactttcatccattggaaaacgtaaccaaatgttcaaagtttcatgcaaggttatcaataataacggtgaccaaaacgttgaaacgaattctgttgatcgaagaaatgttcttcttggcttaggtggtctttatggtgttgctaatgctataccattagctgcatccgctgctccaactccacctcctgatctctcgtcttgtagtatagccaggattaacgaaaatcaggtggtgccgtacagttgttgcgcgcctaagcctgatgatatggagaaagttccgtgagtatattgccaagtacaatttggcggttagcaagatgagggatcttgataagacacaacc

SEQ ID NO: 220 - DNA, 513 bp, Artificial
  Mutation introduced by TALE nuclease pair POT32_T02 within a POT32 allele
gcaagcttgtgcaatagtagtagtacatccctcaaaactccttttacttcttcctccacttctttaacttccactcctaaaccctctcaacttttcatccatggaaaacgtaaccaaatgttcaaagtttcatgcatggttaccaataataacggtgaccaaaaccaaaacgttgaaacgaattctgttgatcgaagaaatgttcttcttggcttaggtggtctttatggtgttgctaatgctataccattagctgcatccgctactccatctccacctcctgatctctcgtcttgtagtatagccaggattaacgaaactcatgtggtgccgtacagttgttgcgcgcctaagcctgatgatatggagaaagttccgtattacaagttcccttctatgactaagctcctcagcctgctcatgaagctaatgaggagtatattgccaagtacaatctggcgattagtcgaatgaaagatcttgataagacacaacctttaaaccctattggtt

SEQ ID NO: 221 - DNA, 515 bp, Artificial
  Mutation introduced by TALE nuclease pair POT32_T02 within a POT32 allele
gcaagcttgtgcaatagtagtagtacatctctcaaaactccttttacttcttcctccacttctttaacttccactcctaagccctctcaacttttcatccatggaaaacgtaaccaaatgttcaaagtttcatgcaaggttaccaataataacggtgaccaaaaccaaaacgttgaaacgaattctgttgatcgaagaaatgttcttcttggcttaggtggtctttatggtgttgctaatgctataccattagctgcatccgctgctccagctccacctcctgatctctcgtcttgtagtatagccaggattaacgaaaatcaggtggtgccgtacagttgttgcgcgcctaagcctgatgatatggagaaagttccgtattacaagttcccttctatgactaagctccggtcagcctgctcatgaagctaatgaggagtatattgccaagtacaatttggcggttagcaagatgagggatcttgataagacacaacctttaaaccctattggtt

SEQ ID NO: 222 - DNA, 506 bp, Artificial
  Mutation introduced by TALE nuclease pair POT32_T02 within a POT32 allele
gcaagcttgtgcaatagtagtagtacatcctctaaaactccttttacttcttcctccacttctttatcttccactcctaagcccctctcaacttttcatccatggaaaacgtaaccaaatgttcaaagtttcatgcaaggttatcaataataacggtgaccaaaacgttgaaacgaattctgttgatcgaagaaatgttcttcttggcttaggtggtctttatggtgttgctaatgctataccattagctgcatccgctgctccaactccacctcctgatctctcgtcttgtagtatagccaggattaacgaaaatcaggtggtgccgtacagttgttgcgcgcctaagcctgatgatatggagaaagttccgtattacaagttcccttctatgactaagcttcagcctgctcatgaagctaatgaggagtatattgccaagtacaatctggcgattagtcgaatgagagatcttgataagacacaacctttaaaccctattggtt

SEQ ID NO: 223 - DNA, 516 bp, Artificial
  Mutation introduced by TALE nuclease pair POT32_T02 within a POT32 allele
gcaagcttgtgcaatagtagtagtacatctctcaaaactccttttacttcttcctccacttctttaacttccactcctaagccctctcaacttttcatccatggaaaacgtaaccaaatgttcaaagtttcatgcaaggttaccaataataacggtgaccaaaaccaaaacgttgaaacgaattctgttgatcgaagaaatgttcttcttggcttaggtggtctttatggtgttgctaatgctataccattagctgcatccgctgctccagctccacctcctgatctctcgtcttgtagtatagccaggattaacgaaaatcaggtggtgccgtacagttgttgcgcgcctaagcctgatgatatggagaaagttccgtattacaagttcccttctatgactaagctccgcgtcagcctgctcatgaagctaatgaggagtatattgccaagtacaatctggcgattagtcgaatgaaagatcttgataagacacaacctttaaaccctattggtt

SEQ ID NO: 224 - DNA, 509 bp, Artificial
  Mutation introduced by TALE nuclease pair POT32_T02 within a POT32 allele
gcaagcttgtgcaatagtagtagtacatctctcaaaactccttttacttcttcctccacttctttatcttccactcctaagccctctcaacttttcatccatggaaaacgtaaccaaatgttcaaagtttcatgcaaggttatcaataataacggtgaccaaaacgttgaaacgaattctgttgatcgaagaaatgttcttcttggcttaggtggtctttatggtgttgctaatgctataccattagctgcatccgctgctccaactccacctcctgatctctcgtcttgtagtatagccaggattaacgaaaatcaggtggtgccgtacagttgttgcgcgcctaagcctgatgatatggagaaagttccgtattacaagttcccttctatgactaagctccgttcagcctgctcatgaagctaatgaggagtatattgccaagtacaatctggcgattagtcgaatgagagatcttgataagacacaacctttaaaccctattggtt

SEQ ID NO: 225 - DNA, 511 bp, Artificial
  Mutation introduced by TALE nuclease pair POT32_T02 within a POT32 allele
gcaagcttgtgcaatagtagtagtacatctctcaaaactccttttacttcttcctccacttctttatcttccactcctaagccctctcaacttttcatccatggaaaacgtaaccaaatgttcaaagtttcatgcaaggttaccaataataacggtgaccaaaaccaaaacgttgaaacaaattctgttgatcgaagaaatgttcttcttggcttaggtggtctttatggtgttgctaatgctataccattagctgcatccgctgctccagctccacctcctgatctctcgtcttgtagtatagccaggattaacgaaaatcaggtggtgccgtacagttgttgcgcgcctaagcctgatgatatggagaaagttccgtattacaagttcccttctatgactaagctctagcctgctcatgaagctaatgaggagtatattgccaagtacaatctggcgattagtcgaatgaaagatcttgataagacacaacctttaaaccctattggtt

SEQ ID NO: 226 - DNA, 476 bp, Artificial
  Mutation introduced by TALE nuclease pair POT32_T02 within a POT32 allele
gcaagcttgtgcaatagtagtagtacatctctcaaaactccttttacttcttcctccacttctttaacttccactcctaaaccctctcaacttttcatccatggaaaacgtaaccaaatgttcaaagtttcatgcatggttaccaataataacggtgaccaaaaccaaaacgttgaaacgaattctgttgatcgaagaaatgttcttcttggcttaggtggtctttatggtgttgctaatgctataccattagctgcatccgctactccatctccacctcctgatctctcgtcttgtagtatagccaggattaacgaaactcatgtggtgccgtacagttgttgcgcgcctaagcctgatgatatggagaaagttctcagcctgctcatgaagctaatgaggagtatattgccaagtacaatttggcggttagcaagatgagggatcttgataagacacaacctttaaaccctatt

SEQ ID NO: 227 - DNA, 439 bp, Artificial
  Mutation introduced by TALE nuclease pair POT32_T02 within a POT32 allele
  misc_feature (159): n is a or c or t or g
gcaagcttgtgcaatagtagtagtacatccctcaaaactccttttacttcttcctccacttctttaacttccactcctaaacccctctcaacttttcatccatggaaaacgtaaccaaatgttcaaagtttcatgcatggttaccaataataacggtgnccaaaccaaaacgttgaaacgaattctgttgatcgaagaaatgttcttcttggcttaggtggtctttatggtgttgctaatgctataccattagctgcatccgctactccatctccacctcctgatctctcgtcttgtagtatagccaggattaacgaaactcatgtggtgccgtacagttgttgcgcgcctaagcctgatgatatggagaaagttccgtattacaagttcccttctttgttcgtcgcctgctcatgaagctaatgaggagtatattgcc

SEQ ID NO: 228 - DNA, 515 bp, Artificial
  Mutation introduced by TALE nuclease pair POT32_T02 within a POT32 allele
gcaagcttgtgcaatagtagtagtacatctctcaaaactccttttacttcttcctccacttctttacttccactcctaagccctctcaacttttcatccatggaaaacgtaaccaaatgttcaaagtttcatgcaaggttaccaataataacggtgaccaaaaccaaaacgttgaaacaaattctgttgatcgaagaaatgttcttcttggcttaggtggtctttatggtgttgctaatgctataccattagctgcatccgctgctccagctccacctcctgatctctcgtcttgtagtatagccaggattaacgaaaatcaggtggtgccgtacagttgttgcgcgcctaagcctgatgatatggagaaagttccgtattacaagttcccttctatgactaagctccgtctgcgcctgctcatgaagctaatgaggagtatattgccaagtacaatctggcgattagtcgaatgaaagatcttgataagacacaacctttaaaccctattggtt

SEQ ID NO: 229 - DNA, 514 bp, Artificial
  Mutation introduced by TALE nuclease pair POT32_T02 within a POT32 allele
gcaagcttgtgcaatagttgtagtacatctctcaaaactccttttacttcttcctccacttctttaacttccactcctaaaccctctcaacttttcatccatggaaaacgtaaccaaatgttcaaagtttcatgcaaggttaccaataatcaacggtgaccgaaaaccaaaacagttgaaacgaattctgttgatcgaagaaatgttcttcttggcttaggtggtctttatggtgttgctaatgctataccattagctgcatccgctactccatctccacctcctgatctctcgtcttgtagtatagccaggattaacgaaactcatgtggtgccgtacagttgttgcgcgcctaagcctgatgatatggagaaagttccgtattacaagttcccttctatgactaagcgtcagcctgctcatgaagctaatgaggagtatattgccaagtacaatttggcggttagcaagatgagggatcttgataagacacaacctttaaaccctattggtt

SEQ ID NO: 230 - DNA, 513 bp, Artificial
  Mutation introduced by TALE nuclease pair POT32_T02 within a POT32 allele
gcaagcttgtgcaatagtagtagtacatctctcaaaactccttttacttcttcctccacttctttaacttccactcctaagccctctcaacttttcatccatggaaaacgtaaccaaatgttcaaagtttcatgcaaggttaccaataataacggtgaccaaaaccaaaacgttgaaacgaattctgttgatcgaagaaatgttcttcttggcttaggtggtctttatggtgttgctaatgctataccattagctgcatccgctgctccagctccacctcctgatctctcgtcttgtagtatagccaggattaacgaaaatcaggtggtgccgtacagttgttgcgcgcctaagcctgatgatatggagaaagttccgtattacaagttcccttctatgactaagctcgtcagcctgctcatgaagctaatgaggagtatattgccaagtacaatttggcggttagcaagatgagggatcttgataagacacaacctttaaaccctattggtt

SEQ ID NO: 231 - DNA, 489 bp, Artificial
  Mutation introduced by TALE nuclease pair POT32_T02 within a POT32 allele
gcaagcttgtgcaatagtagtagtacatctctcaaaactccttttacttcttcctccacttctttacttccactcctaagccctctcaacttttcatccatggaaaacgtaaccaaatgttcaaagtttcatgcaaggttaccaataataacggtgaccaaaaccaaaacgttgaaacgaattctgttgatcgaagaaatgttcttcttggcttaggtggtctttatggtgttgctaatgctataccattagctgcatccgctgctccagctccacctcctgatctctcgtcttgtagtatagccaggattaacgaaaatcaggtggtgccgtacagttgttgcgcgcctaagcctgatgatatggagaaagttccgtattacaagttcccttctatgactaagctagctaatgaggagtatattgccaagtacaatttggcggttagcaagatgagggatcttgataagacacaacctttaaacccta

SEQ ID NO: 232 - DNA, 493 bp, Artificial
  Mutation introduced by TALE nuclease pair POT32_T02 within a POT32 allele
gcaagcttgtgcaatagtagtagtacatctctcaaaactccttttacttcttcctccacttctttacttccactcctaaccgcctctcaacttttcatccatggaaaacgtaaccaaatgttcaaagtttcatgcagttgtcaataataacggtgaccaaaacgttgaaacgaattctgttgatcgaagaaatgttcttcttggcttaggtggtctttatggtgttgctaatgctataccattagctgcatccgctgctccaactccacctcctgatctctcgtcttgtagtatagccaggattaacgaaaatcaggtggtgccgtacagttgttgcgcgcctaagcctgatgatatggagaaagttccgtattacaagttcccttctatgactatcagcctgctcatgaagctaatgaggagtatattgccaagtacaatctggcgattagtcgaatgagagatcttgataagacacaacctttaaacccta

SEQ ID NO: 233 - DNA, 486 bp, Artificial
  Mutation introduced by TALE nuclease pair POT32_T02 within a POT32 allele
gcaagcttgtgcaatagtagtagtacatctctcaaaactccttttacttcttcctccacttctttatcttccactcctaagcccctctcaacttttcatccatggaaaacgtaaccaaatgttcaaagtttcatgcaaggttatcaataataacggtgaccaaaacgttgaaacgaattctgttgatcgaagaaatgttcttcttggcttaggtggtctttatggtgttgctaatgctataccattagctgcatccgctgctccaactccacctcctgatctctcgtcttgtagtatagccaggattaacgaaaatcaggtggtgccgtacagttgttgcgcgcctaagcctgatgatatggagaaagttccgtattacaagttcccttcagcctgctcatgaagctaatgaggagtatattgccaagtacaatctggcgattagtcgaatgagagatcttgataagacacaacctttaaacccta

SEQ ID NO: 234 - DNA, 514 bp, Artificial
  Mutation introduced by TALE nuclease pair POT32_T02 within a POT32 allele
gcaagcttgtgcaatagttgtagtacatccctcaaaactccttttacttcttcctccacttctttaacttccactcctaaaccctctcaacttttcatccatggaaaacgtaaccaaatgttcaaagtttcatgcatggttaccaataataacggtgaccaaaaccaaaacgttgaaacgaattctgttgatcgaagaaatgttcttcttggcttaggtggtctttatggtgttgctaatgctataccattagctgcatccgctactccatctccacctcctgatctctcgtcttgtagtatagccaggattaacgaaactcatgtggtgccgtacagttgttgcgcgcctaagcctgatgatatggagaaagttccgtattacaagttcccttctatgactaagctccgtcagcctgctcatgaagctaatgaggagtatattgccaagtacaatctggcgattagtcgaatgaaagatcttgataagacacaacctttaaaccctattggtt

SEQ ID NO: 235 - DNA, 503 bp, Artificial
  Mutation introduced by TALE nuclease pair POT32_T02 within a POT32 allele
gcaagcttgtgcaatagtagtagtacatctctcaaaactccttttacttcttcctccacttctttatcttccactcctaagccctctcaacttttcatccatggaaaacgtaaccaaatgttcaaagtttcatgcaaggttaccaataataacggtgaccaaaaccaaaacgttgaaacgaattctgttgatcgaagaaatgttcttcttggcttaggtggtctttatggtgttgctaatgctataccattagctgcatccgctactccatctccacctcctgatctctcgtcttgtagtatagccaggattaacgaaactcatgtggtgccgtacagttgttgcgcgcctaagcctgatgatatggagaaagttccgtattacaagttcccttctatgactatgtcagcctgctcatgaagctaatgaggagtatattgccaagtacaatctggcgattagtcgaatgaaagatcttgataagacacaacctttaaacccta

SEQ ID NO: 236 - DNA, 461 bp, Artificial
  Mutation introduced by TALE nuclease pair POT32_T02 within a POT32 allele
gcaagcttgtgcaatagtagtagtacatctctcaaaactccttttacttcttcctccacttctttaacttccattcctaaccgcctctcaacttttcatccatggaaaacgtaaccaaatgttcaaagtttcatgcaaggttaccaataataacggtgaccaaaaccaaaacgttgaaacgaattctgttgatcgaagaaatgttcttcttggcttaggtggtctttatggtgttgctaatgctataccattagctgcatccgctgctccagctccacctcctgatctctcgtcttgtagtatagccaggattaacgaaaatcaggtggtgccgtacagttgttgcgcgcctaagcctgatgatatggagaaagttccgtattacaagttcccttctatgactaagctctgtcagcctgctcatgaagctaatgaggagtatattgccaagtacaattgcg

SEQ ID NO: 237 - DNA, 515 bp, Artificial
  Mutation introduced by TALE nuclease pair POT32_T02 within a POT32 allele
gcaagcttgtgcaatagtagtagtacatctctcaaaactccttttacttcttcctccacttctttatcttccactcctaagcccctctcaacttttcatccatggaaaacgtaaccaaatgttcaaagtttcatgcaaggttaccaataataacggtgaccaaaaccaaaacgttgaaacaaattctgttgatcgaagaaatgttcttcttggcttaggtggtctttatggtgttgctaatgctataccattagctgcatccgctgctccagctccacctcctgatctctcgtcttgtagtatagccaggattaacgaaaatcaggtggtgccgtacagttgttgcgcgcctaagcctgatgatatggagaaagttccgtattacaagttcccttctatgactaagctctgttagcctgctcatgaagctaatgaggagtatattgccaagtacaatctggcgattagtcgaatgagagatcttgataagacacaacctttaaaccctattggtt

SEQ ID NO: 238 - DNA, 505 bp, Artificial
  Mutation introduced by TALE nuclease pair POT32_T02 within a POT32 allele
gcaagcttgtgcaatagtagtagtacatctctcaaaactccttttacttcttcctccacttctttatcttccactcctaagcccctctcaacttttcatccatggaaaacgtaaccaaatgttcaaagtttcatgcaaggttaccaataataacggtgaccaaaaccaaaacgttgaaacaaattctgttgatcgaagaaatgttcttcttggcttaggtggtctttatggtgttgctaatgctataccattagctgcatccgctgctccagctccacctcctgatctctcgtcttgtagtatagccaggattaacgaaaatcaggtggtgccgtacagttgttgcgcgcctaagcctgatgatatggagaaagttccgtattacaagttcccttctatgactaagctccgcctgctcatgaagctaatgaggagtatattgccaagtacaatttggcggttagcaagatgaggggatcttgataagacacaatcctttaaaccc

SEQ ID NO: 239 - DNA, 499 bp, Artificial
  Mutation introduced by TALE nuclease pair POT32_T02 within a POT32 allele
gcaagcttgtgcaatagtagtagtacatctctcaaaactccttttacttcttcctccacttctttaacttccactcctaagccctctcaactttcatccatggaaaacgtaaccaaatgttcaaagtttcatgcaaggttaccaataataacggtgaccaaaaccaaaacgttgaaacgaattctgttgatcgaagaaatgttcttcttggcttaggtggtctttatggtgttgctaatgctataccattagctgcatccgctgctccagctccacctcctgatctctcgtcttgtagtatagcccaggatttaacgaaaatcaggtggtgccgtacagttgttgcgcgcctaagcctgatgatatggagaaagttccgtattacaagttcccttctatgactaagctccgcatgaagctaatgaggagtatattgccaagtacaatctggcgattagtcgaatgaaagatcttgataagacacaacctttaaacccta

SEQ ID NO: 240 - DNA, 490 bp, Artificial
  Mutation introduced by TALE nuclease pair POT32_T02 within a POT32 allele
gcaagcttgtgcaatagtagtagtacatctctcaaaactccttttacttcttcctccacttctttatcttccactcctaagcccctctcaacttttcatccatggaaaacgtaaccaaatgttcaaagtttcatgcaaggttaccaataataacggtgaccaaaaccaaaacgttgaaacaaattctgttgatcgaagaaatgttcttcttggcttaggtggtctttatggtgttgctaatgctataccattagctgcatccgctgctccagctccacctcctgatctctcgtcttgtagtatagccaggattaacgaaaatcaggtggtgccgtacagttgttgcgcgcctaagcctgatgatatggagaaagttccgtattacaagttcccttctatgactcgtcagcctgctcatgaagctaatgaggagtatattgccaagtacaatctggcgattagtcgaatgaaagatcttgataagacacaa

SEQ ID NO: 241 - DNA, 515 bp, Artificial
  Mutation introduced by TALE nuclease pair POT32_T02 within a POT32 allele
gcaagcttgtgcaatagtagtagtacatctctcaaaactccttttacttcttcctccacttctttatcttccactcctaagccctctcaacttttcatccatggaaaacgtaaccaaatgttcaaagtttcatgcaaggttaccaataataacggtgaccaaaaccaaaacgttgaaacgaattctgttgatcgaagaaatgttcttcttggcttaggtggtctttatggtgttgctaatgctataccattagctgcatccgctgctccagctccacctcctgatctctcgtcttgtagtatagccaggattaacgaaaatcaggtggtgccgtacagttgttgcgcgcctaagcctgatgatatggagaaagttccgtattacaagttcccttctatgactaagctccgttcagcctgctcatgaagctaatgaggagtatattgccaagtacaatttggcggttagcaagatgagggatcttgataagacacaacctttaaaccctattggtt

SEQ ID NO: 242 - DNA, 427 bp, Artificial
  Mutation introduced by TALE nuclease pair POT32_T02 within a POT32 allele
gcaagcttgtgcaatagtagtagtacatctctcaaaactccttttacttcttcctccacttctttaacttccactcctaagccctctcaacttttcatccatggaaaacgtaaccaaatgttcaaagtttcatgcaaggttaccaataataacggtgaccaaaaccaaaacgttgaaacgaattctgttgatcgaagaaatgttcttcttggcttaggtggtctttatggtgttgctaatgctataccattagctgcatccgctgctccagctccacctcctgatctctcgtcttgtagtatagccaggattaacgaaaatcaggtggtgccgtacagttgttgcgcgcctaagcctgatgatatggagaaagttccaagtacaatctggcgattagtcgaatgaaagatcttgataagacacaacc

SEQ ID NO: 243 - DNA, 514 bp, Artificial
  Mutation introduced by TALE nuclease pair POT32_T02 within a POT32 allele
gcaagcttgtgcaatagtagtagtacatctctcaaaactccttttacttcttcctccacttctttaacttccactcctaaaccctctcaacttttcatccatggaaaacgtaaccaaatgttcaaagtttcatgcatggttaccaataataacggtgaccaaaaccaaaacgttgaaacgaattctgttgatcgaagaaatgttcttcttggcttaggtggtctttatggtgttgctaatgctataccattagctgcatccgctactccatctccacctcctgatctctcgtcttgtagtatagccaggattaacgaaactcatgtggtgccgtacagttgttgcgcgcctaagcctgatgatatggagaaagttccgtattacaagttcccttctatgactaagctccgtcagcctgctcatgaagctaatgaggagtatattgccaagtacaatttggcggttagcaagatgagggatcttgataagacacaacctttaaaccctattggtt

SEQ ID NO: 244 - DNA, 508 bp, Artificial
  Mutation introduced by TALE nuclease pair POT32_T02 within a POT32 allele
gcaagcttgtgcaatagttgtagtacatccctcaaaactccttttacttcttcctccacttctttaacttccactcctaaaccctctcaacttttcatccatggaaaacgtaaccaaatgttcaaagtttcatgcatggttaccaataataacggtgaccaaaaccaaaacgttgaaacgaattctgttgatcgaagaaatgttcttcttggcttaggtggtctttatggtgttgctaatgctataccattagctgcatccgctactccatctccacctcctgatctctcgtcttgtagtatagccaggattaacgaaactcatgtggtgccgtacagttgttgcgcgcctaagcctgatgatatggagaaagttccgtattacaagttcccttctatgactaagctccgtcagcctgctcatgaagctaatgaggagtatattgccaagtacaatttggcggttagcaagatgaggggatcttgataagacacaacctttaaaccct

SEQ ID NO: 245 - DNA, 449 bp, Artificial
  Mutation introduced by TALE nuclease pair POT32_T02 within a POT32 allele
  misc_feature (157); (406): n is a or c or t or g
gcaagcttgtgcaatagtgtagtacatccctcaaaactccttttacttcttcctccacttctttaacttccactcctaaacccctctcaacttttcatccatggaaaacgtaaccaaatgttcaaagtttcatgcagtgttccaataataacggtgnccaaaaccaacgttgaaacgaattctgttgatcgaagaaatgttcttcttggcttaggtggtctttatggtgttgctaatgctataccattagctgcatccgctactccatctccacctcctgatctctcgtcttgtagtatagccaggattaacgaaactcatgtggtgccgtacagttgttgcgcgcctaagcctgatgatatggagaaagttccgtattacaagttcccttctatgactaagctcngctgctctgagctaatgaggagtatattgccaagtacaattgc

SEQ ID NO: 246 - DNA, 513 bp, Artificial
  Mutation introduced by TALE nuclease pair POT32_T02 within a POT32 allele
gcaagcttgtgcaatagtagtagtacatctctcaaaactccttttacttcttcctccacttctttacttccactcctaagccctctcaacttttcatccatggaaaacgtaaccaaatgttcaaagtttcatgcaaggttaccaataataacggtgaccaaaaccaaaacgttgaaacaaattctgttgatcgaagaaatgttcttcttggcttaggtggtctttatggtgttgctaatgctataccattagctgcatccgctgctccagctccacctcctgatctctcgtcttgtagtatagccaggattaacgaaaatcaggtggtgccgtacagttgttgcgcgcctaagcctgatgatatggagaaagttccgtattacaagttcccttctatgactaagctgctctgctgcctctatgaagctaatgaggagtatattgccaagtacaatctggcgattagtcgaatgaaagatcttgataagacacaacctttaaaccctattggtt

SEQ ID NO: 247 - DNA, 515 bp, Artificial
  Mutation introduced by TALE nuclease pair POT32_T02 within a POT32 allele
gcaagcttgtgcaatagtagtagtacatctctcaaaactccttttacttcttcctccacttctttaacttccactcctaagccctctcaacttttcatccatggaaaacgtaaccaaatgttcaaagtttcatgcaaggttaccaataataacggtgaccaaaaccaaaacgttgaaacgaattctgttgatcgaagaaatgttcttcttggcttaggtggtctttatggtgttgctaatgctataccattagctgcatccgctactccatctccacctcctgatctctcgtcttgtagtatagccaggattaacgaaactcatgtggtgccgtacagttgttgcgcgcctaagcctgatgatatggagaaagttccgtattacaagttcccttctatgactaagctccgtcagcctgctcatgaagctaatgaggagtatattgccaagtacaatttggcggttagcaagatgaggggatcttgataagacacaacctttaaaccctattggtt

SEQ ID NO: 248 - DNA, 478 bp, Artificial
  Mutation introduced by TALE nuclease pair POT32_T02 within a POT32 allele
gcaagctttgcaatagttgtagtacatctctcaaaactccttttacttcttcctccacttctttaacttccactcctaaaccctctcaacttttcatccatggaaaacgtaaccaaatgttcaaagtttcatgcaaggttaccaataataacggtgaccaaaaccaaaacgttgaaacgaattctgttgatcgaagaaatgttcttcttggcttaggtggtctttatggtgttgctaatgctataccattagctgcatccgctactccatctccacctcctgatctctcgtcttgtagtatagccaggattaacgaaactcatgtggtgccgtacagttgttgcgcgcctaagcctgatgatatggagaaagttccgtattacaagttcccttctatgactaagagtatattgccaagtacaatttggcggttagcaagatgagggatcttgataagacacaacctttaaaccctatt

SEQ ID NO: 249 - DNA, 461 bp, Artificial
  Mutation introduced by TALE nuclease pair POT32_T02 within a POT32 allele
  misc_feature (154): n is a or c or t or g
gcaagcttgtgcaatagtagtagtacatctctcaaaactccttttacttcttcctccacttctttaacttccactcctaagcccctctcaacttttcatccatggaaaacgtaaccaaatgttcaaagtttcatgcagttgctacaataatagngcgaaccaaaaccaaacgttgaaacgaattctgttgatcgaagaaatgttcttcttggcttaggtggtctttatggtgttgctaatgctataccattagctgcatccgctactccatgtccacctcctgatctctcgtcttgtagtatagccaggattaacgaaactcagtggtgccgtacagttgttgcgcgcctaagcctgatgatatggagaaagttccgtattacaagttcccttctatgactaagctccgcgtcagcctgctcatgaagctaatgaggagtatattgccaagtacaattgcg

SEQ ID NO: 250 - DNA, 474 bp, Artificial
  Mutation introduced by TALE nuclease pair POT32_T02 within a POT32 allele
gcaagcttgtgcaatagtagtagtacatccctcaaaactccttttacttcttcctccacttctttaacttccactcctaaaccctctcaacttttcatccatggaaaacgtaaccaaatgttcaaagtttcatgcatggttaccaataataacggtgaccaaaaccaaaacgttgaaacgaattctgttgatcgaagaaatgttcttcttggcttaggtggtctttatggtgttgctaatgctataccattagctgcatccgctactcatctccacctcctgatctctcgtcttgtagtatagccaggattaacgaaactcatgtggtgccgtacagttgttgcgcgcctaagcctgatgatatggagaaagttccgtattacaagttcccttctatgactaagctccgtcagcctgctcatgaagctaatgaggagtatattgccaagtacaatttggcggttagcaagatga

SEQ ID NO: 251 - DNA, 514 bp, Artificial
  Mutation introduced by TALE nuclease pair POT32_T02 within a POT32 allele
gcaagcttgtgcaatagtagtagtacatccctcaaaactccttttacttcttcctccacttctttaacttccactcctaaaccctctcaacttttcatccatggaaaacgtaaccaaatgttcaaagtttcatgcatggttaccaataataacggtgaccaaaaccaaaacgttgaaacgaattctgttgatcgaagaaatgttcttcttggcttaggtggtctttatggtgttgctaatgctataccattagctgcatccgctactccatctccacctcctgatctctcgtcttgtagtatagccaggattaacgaaactcatgtggtgccgtacagttgttgcgcgcctaagcctgatgatatggagaaagttccgtattacaagttcccttctatgactaagctctgtcagcctgctcatgaagctaatgaggagtatattgccaagtacaatctggcgattagtcgaatgaaagatcttgataagacacaacctttaaaccctattggtt

SEQ ID NO: 252 - DNA, 475 bp, Artificial
  Mutation introduced by TALE nuclease pair POT32_T02 within a POT32 allele
gcaagcttgtgcaatagtagtagtacatctctcaaaactccttttacttcttcctccacttctttaacttccactcctaagcccctctcaacttttcatccatggaaaacgtaaccaaatgttcaaagtttcatgcaaggttaccaataataacggtgaccaaaaccaaaacgttgaaaacgaattctgttggtcagaagaaatgttcatttcttgcttgaggttggatgcgtttcatttggtggttgcttaatgactataccattagctacatccgctgctccagctccacctcctgatctctcgtcttgtagtatagccaggattaacgaaaatcaggtggtgccgtacagttgttgcgcgcctaagcctgatgatatggagaaagttccgtattacaagttcccttctatggcctgctcatgaagctaatgaggagtatattgccaagtacaatctggcgattagtcgaatg

SEQ ID NO: 253 - DNA, 510 bp, Artificial
  Mutation introduced by TALE nuclease pair POT32_T02 within a POT32 allele
gcaagcttgtgcaatagtagtagtacatctctcaaaactccttttacttcttcctccacttctttatcttccactcctaagccctctcaacttttcatccatggaaaacgtaaccaaatgttcaaagtttcatgcaaggttatcaataataacggtgaccaaaacgttgaaacgaattctgttgatcgaagaaatgttcttcttggcttaggtggtctttatggtgttgctaatgctataccattagctgcatccgctgctccaactccacctcctgatctctcgtcttgtagtatagccaggattaacgaaaatcaggtggtgccgtacagttgttgcgcgcctaagcctgatgatatggagaaagttccgtattacaagttcccttctatgactaagctccgtcgtgcgcctgctcatgaagctaatgaggagtatattgccaagtacaatctggcgattagtcgaatgaagatcttgataagacacaacctttaaaccctattggtt

SEQ ID NO: 254 - DNA, 515 bp, Artificial
  Mutation introduced by TALE nuclease pair POT32_T02 within a POT32 allele
gcaagcttgtgcaatagtagtagtacatctctcaaaactccttttacttcttcctccacttctttatcttccactcctaagcccctctcaacttttcatccatggaaaacgtaaccaaatgttcaaagtttcatgcaaggttaccaataataacggtgaccaaaaccaaaacgttgaaacgaattctgttgatcgaagaaatgttcttcttggcttaggtggtctttatggtgttgctaatgctataccattagctgcatccgctgctccagctccacctcctgatctctcgtcttgtagtatagccaggattaacgaaaatcaggtggtgccgtacagttgttgcgcgcctaagcctgatgatatggagaaagttccgtattacaagttcccttctatgactaagctccgtcagcctgctcatgaagctaatgaggagtatattgccaagtacaatttggcggttagcaagatgagggatcttgataagacacaacctttaaaccctattggtt

SEQ ID NO: 255 - DNA, 514 bp, Artificial
  Mutation introduced by TALE nuclease pair POT32_T02 within a POT32 allele
gcaagcttgtgcaatagtagtagtacatctctcaaaactccttttacttcttcctccacttctttatcttccactcctaagccctctcaacttttcatccatggaaaacgtaaccaaatgttcaaagtttcatgcaaggttaccaataataacggtgaccaaaaccaaaacgttgaaacgaattctgttgatcgaagaaatgttcttcttggcttaggtggtctttatggtgttgctaatgctataccattagctgcatccgctgctccagctccacctcctgatctctcgtcttgtagtatagccaggattaacgaaaatcaggtggtgccgtacagttgttgcgcgcctaagcctgatgatatggagaaagttccgtattacaagttcccttctatgactaagctccgcagcctgctcatgaagctaatgaggagtatattgccaagtacaatttggcggttagcaagatgaggggatcttgataagacacaacctttaaaccctattggtt

SEQ ID NO: 256 - DNA, 513 bp, Artificial
  Mutation introduced by TALE nuclease pair POT32_T02 within a POT32 allele
gcaagcttgtgcaatagtagtagtacatctctcaaaactccttttacttcttcctccacttctttatcttccactcctaagcccctctcaacttttcatccatggaaaacgtaaccaaatgttcaaagtttcatgcaaggttaccaataataacggtgaccaaaaccaaaacgttgaaacgaattctgttgatcgaagaaatgttcttcttggcttaggtggtctttatggtgttgctaatgctataccattagctgcatccgctgctccagctccacctcctgatctctcgtcttgtagtatagccaggattaacgaaaatcaggtggtgccgtacagttgttgcgcgcctaagcctgatgatatggagaaagttccgtattacaagttcccttctatgactattcgtcagcctgctcatgaagctaatgaggagtatattgccaagtacaatttggcggttagcaagatgaggggatcttgataagacacaacctttaaaccctattggtt

SEQ ID NO: 257 - DNA, 511 bp, Artificial
  Mutation introduced by TALE nuclease pair POT32_T02 within a POT32 allele
gcaagcttgtgcaatagttgtagtacatctctcaaaactccttttacttcttcctccacttctttaacttccactcctaaaccctctcaacttttcatccatggaaaacgtaaccaaatgttcaaagtttcatgcaaggttaccaataataacggtgaccaaaaccaaaacgttgaaacgaattctgttgatcgaagaaatgttcttcttggcttaggtggtctttatggtgttgctaatgctataccattagctgcatccgctactccatctccacctcctgatctctcgtcttgtagtatagccaggattaacgaaactcatgtggtgccgtacagttgttgcgcgcctaagcctgatgatatggagaaagttccgtattacaagttcccttctatgactaagctctagcctgctcatgaagctaatgaggagtatattgccaagtacaatttggcggttagcaagatgagggatcttgataagacacaacctttaaaccctattggtt

SEQ ID NO: 258 - DNA, 482 bp, Artificial
  Mutation introduced by TALE nuclease pair POT32_T02 within a POT32 allele
gcaagcttgtgcaatagtagtagtacatctctcaaaactccttttacttcttcctccacttctttaacttccactcctaagcccctctcaacttttcatccatggaaaacgtaaccaaatgttcaaagtttcatgcaaggttaccaataataacggtgaccaaaaccaaaacgttgaaacgaattctgttgatcgaagaaatgttcttcttggcttaggtggtctttatggtgttgctaatgctataccattagctgcatccgctgctccagctccacctcctgatctctcgtcttgtagtatagccaggattaacgaaaatcaggtggtgccgtacagttgttgcgcgcctaagcctgatgatatggagaaagttccgtattacaagttcccttctatgactaagctccgtgttgccaagtacaatttggcggttagcaagatgaggggatcttgataagacacaacctttaaaccctatt

SEQ ID NO: 259 - DNA, 514 bp, Artificial
  Mutation introduced by TALE nuclease pair POT32_T02 within a POT32 allele
gcaagctgtgcaatagtagtagtacatctctcaaacatccttttacttcttcctccacttctttaacttccactcctaagcccctctcaacttttcatccatggaaaacgtaaccaaatgttcaaagtttcatgcaaggttaccaataataacggtgaccaaaaccaaaacgttgaaacgaattctgttgatcgaagaaatgttcttcttggcttaggtggtctttatggtgttgctaatgctataccattagctgcatccgctgctccagctccacctcctgatctctcgtcttgtagtatagccaggattaacgaaaatcaggtggtgccgtacagttgttgcgcgcctaagcctgatgatatggagaaagttccgtattacaagttcccttctatgactaagctccgtcagcctgctcatgaagctaatgaggagtatattgccaagtacaatctggcgattagtcgaatgaaagatcttgataagacacaacctttaaaccctattggtt

SEQ ID NO: 260 - DNA, 463 bp, Artificial
  Mutation introduced by TALE nuclease pair POT32_T02 within a POT32 allele
  misc_feature (155): n is a or c or t or g
gcaagcttgtgcaatagtagtagtacatcctctcaaaactccttttacttcttcctccacttctttaacttccactcctaacgcctctcaacttttcatccatggaaaacgtaaccaaatgttcaaagtttcatgcaagttgactaatcaataanagtgacgaaacccaaaaaccaagttgaaacgaattctgttgatcgaagaaatgttcttcttggcttaggtggtctttatggtgttgctaatgctataccattagctgcatccgctgctccagctccacctcctgatctctcgtcttgtagtatagccaggattaacgaaaatcaggtggtgccgtacagttgttgcgcgcctaagcctgatgatatggagaaagttccgtattacaagttcccttctatgactaagctcagctgctcatgagctaatgaggagtatattgccaagtacaattgcgtgc

SEQ ID NO: 261 - DNA, 493 bp, Artificial
  Mutation introduced by TALE nuclease pair POT32_T02 within a POT32 allele
gcaagcttgtgcaatagtagtagtacatccctcaaaactccttttacttcttcctccacttctttaacttccactcctaaaccctctcaacttttcatccatggaaaacgtaaccaaatgttcaaagtttcatgcatggttaccaataataacggtgaccaaaaccaaaacgttgaaacgaattctgttgatcgaagaaatgttcttcttggcttaggtggtctttatggtgttgctaatgctataccattagctgcatccgctgctccagctccacctcctgatctctcgtcttgtagtatagccaggattaacgaaaatcaggtggtgccgtacagttgttgcgcgcctaagcctgatgatatggagaaagttccgtattacaagttcccttcgtcagctgctcatgaagctaatgaggagtatattgccaagtacaatctggcgattagtcgaatgaaagatcttgataagacacaacctttaaacccta

SEQ ID NO: 262 - DNA, 510 bp, Artificial
  Mutation introduced by TALE nuclease pair POT32_T02 within a POT32 allele
gcaagcttgtgcaatagtagtagtacatctctcaaaactccttttacttcttcctccacttctttatcttccactcctaagccctctcaacttttcatccatggaaaacgtaaccaaatgttcaaagtttcatgcaaggttaccaataataacggtgaccaaaaccaaaacgttgaaacgaattctgttgatcgaagaaatgttcttcttggcttaggtggtctttatggtgttgctaatgctataccattagctgcatccgctgctccagctccacctcctgatctctcgtcttgtagtatagccaggattaacgaaaatcaggtggtgccgtacagttgttgcgcgcctaagcctgatgatatggagaaagttccgtattacaagttcccttctatgactaagctccgtctgctcatgaagctaatgaggagtatattgccaagtacaatttggcggttagcaagatgagggatcttgataagacacaacctttaaaccctattggtt

SEQ ID NO: 263 - DNA, 472 bp, Artificial
  Mutation introduced by TALE nuclease pair POT32_T02 within a POT32 allele
gcaagcttgtgcaatagttgtagtacatctctcaaaactccttttacttcttcctccacttctttaacttccactcctaaaccctctcaacttttcatccatggaaaacgtaaccaaatgttcaaagtttcatgcaaggttaccaataataacggtgaccaaaaccaaaacgttgaaacgaattctgttgatcgaagaaatgttcttcttggcttaggtggtctttatggtgttgctaatgctataccattagctgcatccgctactccatctccacctcctgatctctcgtcttgtagtatagccaggattaacgaaactcatgtggtgccgtacagttgttgcgcgcctaagcctgatgatatggagaaagttccgtattacaagttcccttctatgactaagctccgtcctgctcatgaagctaatgaggagtatattgccaagtacaatttggcggttagcaagatga

SEQ ID NO: 264 - DNA, 496 bp, Artificial
  Mutation introduced by TALE nuclease pair POT32_T02 within a POT32 allele
gcaagcttgtgcaatagtagtagtacatctctcaaaactccttttacttcttcctccacttctttaacttccactcctaagcccctctcaacttttcatccatggaaaacgtaaccaaatgttcaaagtttcatgcaaggttaccaataataacggtgaccaaaaccaaaacgttgaaacgaattctgttgatcgaagaaatgttcttcttggcttaggtggtctttatggtgttgctaatgctataccattagctgcatccgctgctccagctccacctcctgatctctcgtcttgtagtatagccaggattaacgaaaatcaggtggtgccgtacagttgttgcgcgcctaagcctgatgatatggagaaagttccgtattacaagttcccttctatgactaagctcatgaagctaatgaggagtatattgccaagtacaatttggcggttagcaagatgagggatcttgataagacacaacctttaaacccta

SEQ ID NO: 265 - DNA, 491 bp, Artificial
  Mutation introduced by TALE nuclease pair POT32_T02 within a POT32 allele
gcaagcttgtgcaatagtagtagtacatctctcaaaactccttttacttcttcctccacttctttatcttccactcctaagcccctctcaacttttcatccatggaaaacgtaaccaaatgttcaaagtttcatgcaaggttaccaataataacggtgaccaaaaccaaaacgttgaaacgaattctgttgatcgaagaaatgttcttcttggcttaggtggtctttatggtgttgctaatgctataccattagctgcatccgctactccatctccacctcctgatctctcgtcttgtagtatagccaggattaacgaaactcatgtggtgccgtacagttgttgcgcgcctaagcctgatgatatggagaaagttccgtattacaagttcccttctatgactatgtcagcctgctcatgaagctaatgaggagtatattgccaagtacaatctggcgattagtcgaatgaaagatcttgataagacacaa

SEQ ID NO: 266 - DNA, 498 bp, Artificial
  Mutation introduced by TALE nuclease pair POT32_T02 within a POT32 allele
gcaagcttgtgcaatagtagtagtacatctctcaaaactccttttacttcttcctccacttctttaacttccactcctaagccctctcaacttttcatccatggaaaacgtaaccaaatgttcaaagtttcatgcaaggttaccaataataacggtgaccaaaaccaaaacgttgaaacgaattctgttgatcgaagaaatgttcttcttggcttaggtggtctttatggtgttgctaatgctataccattagctgcatccgctgctccagctccacctcctgatctctcgtcttgtagtatagccaggattaacgaaaatcaggtggtgccgtacagttgttgcgcgcctaagcctgatgatatggatgaaagttccgtattacaagttcccttctatgacagcctgctcatgaagctaatgaggagtatattgccaagtacaatttggcggttagcaagatgagggatcttgataagacacaacctttaaacccta

SEQ ID NO: 267 - DNA, 519 bp, Artificial
  Mutation introduced by TALE nuclease pair POT32_T02 within a POT32 allele
  misc_feature (155): n is a or c or t or g
gcaagcttgtgcaatagtagtagtacatcctcaaaactccttttacttcttcctccacttctttaacttccactcctaaaccgcctctcaacttttcatccatggaaaacgtaaccaaatgttcaaagtttcatgcagttgctatcaataatagnggctgaacccaaaaccaaacgttgaaacgaattctgttgatcgaagaaatgttcttcttggcttaggtggtctttatggtgttgctaatgctataccattagctgcatccgctgctccagctccacctcctgatctctcgtcttgtagtatagccaggattaacgaaaatcaggtggtgccgtacagttgttgcgcgcctaagcctgatgatatggagaaggttccgtattacaagttcccttctatgactaagctccggtcagcctgctcatgaagctaatgaggagtatattgccaagtacaatttggcggttagcaagatgagggatcttgataagacacaacctttaaaccctattggtt

SEQ ID NO: 268 - DNA, 507 bp, Artificial
  Mutation introduced by TALE nuclease pair POT32_T02 within a POT32 allele
gcaagcttgtgcaatagtagtagtacatctctcaaaactccttttacttcttcctccacttctttatcttccactcctaagccctctcaacttttcatccatggaaaacgtaaccaaatgttcaaagtttcatgcaaggttatcaataataacggtgaccaaaacgttgaaacgaattctgttgatcgaagaaatgttcttcttggcttaggtggtctttatggtgttgctaatgctataccattagctgcatccgctgctccaactccacctcctgatctctcgtcttgtagtatagccaggattaacgaaaatcaggtggtgccgtacagttgttgcgcgcctaagcctgatgatatggagaaagttccgtattacaagttcccttctatgactaagctccgttcagcctgctcatgaagctaatgaggagtatattgccaagtacaatctggcgattagtcgaatgagagatcttgataagacacaacctttaaaccctattgg

SEQ ID NO: 269 - DNA, 511 bp, Artificial
  Mutation introduced by TALE nuclease pair POT32_T02 within a POT32 allele
gcaagcttgtgcaatagtagtagtacatctctcaaaactccttttacttcttcctccacttctttaacttccactcctaagccctctcaacttttcatccatggaaaacgtaaccaaatgttcaaagtttcatgcaaggttaccaataataacggtgaccaaaaccaaaacgttgaaacgaattctgttgatcgaagaaatgttcttcttggcttaggtggtctttatggtgttgctaatgctataccattagctgcatccgctgctccagctccacctcctgatctctcgtcttgtagtatagccaggattaacgaaaatcaggtggtgccgtacagttgttgcgcgcctaagcctgatgatatggagaaagttccgtattacaagttcccttctatgactaagctccagcctgctcatgaagctaatgaggagtatattgccaagtacaatttggcggttagcaagatgagggatcttgataagacacaacctttaaaccctattggtt

SEQ ID NO: 270 - DNA, 510 bp, Artificial
  Mutation introduced by TALE nuclease pair POT32_T02 within a POT32 allele
gcaagcttgtgcaatagtagtagtacatctctcaaaactccttttacttcttcctccacttctttatcttccactcctaagccctctcaacttttcatccatggaaaacgtaaccaaatgttcaaagtttcatgcaaggttaccaataataacggtgaccaaaaccaaaacgttgaaacgaattctgttgatcgaagaaatgttcttcttggcttaggtggtctttatggtgttgctaatgctataccattagctgcatccgctgctccagctccacctcctgatctctcgtcttgtagtatagccaggattaacgaaaatcaggtggtgccgtacagttgttgcgcgcctaagcctgatgatatggagaaagttccgtattacaagttcccttctatgactaagctcagcctgctcatgaagctaatgaggagtatattgccaagtacaatttggcggttagcaagatgagggatcttgataagacacaacctttaaaccctattggtt

SEQ ID NO: 271 - DNA, 517 bp, Artificial
  Mutation introduced by TALE nuclease pair POT32_T02 within a POT32 allele
gcaagcttgtgcaatagtagtagtacatctctcaaaactccttttacttcttcctccacttctttaacttccactcctaaaccgcctctcaacttttcatccatggaaaacgtaaccaaatgttcaaagtttcatgcaaggttaccaataataacggtgaccaaaaccaaaacgttgaaacgaattctgttgatcgaagaaatgttcttcttggcttaggtggtctttatggtgttgctaatgctataccattagctgcatccgctactccatctccacctcctgatctctcgtcttgtagtatagccaggattaacgaaactcatgtggtgccgtacagttgttgcgcgcctaagcctgatgatatggagaaagttccgtattacaagttcccttctatgactaagctccgtcagcctgctcatgaagctaatgaggagtatattgccaagtacaatttggcggttagcaagatgaggggatcttgataagacacaacctttaaaccctattggtt

SEQ ID NO: 272 - DNA, 501 bp, Artificial
  Mutation introduced by TALE nuclease pair POT32_T02 within a POT32 allele
gcaagcttgtgcaatagtagtagtacatctctcaaaactccttttacttcttcctccacttctttaacttccactcctaagccctctcaacttttcatccatggaaaacgtaaccaaatgttcaaagtttcatgcaaggttaccaataataacggtgaccaaaaccaaaacgttgaaacgaattctgttgatcgaagaaatgttcttcttggcttaggtggtctttatggtgttgctaatgctataccattagctgcatccgctgctccagctccacctcctgatctctcgtcttgtagtatagccaggattaacgaaaatcaggtggtgccgtacagttgttgcgcgcctaagcctgatgatatggagaaagttccgtattacaagttcccttctatgactaagctccgctcatgaagctaatgaggagtatattgccaaagtacaatctggcgattagtcgaatgaaagatcttgataagacacaacctttaaacccta

SEQ ID NO: 273 - DNA, 514 bp, Artificial
  Mutation introduced by TALE nuclease pair POT32_T02 within a POT32 allele
gcaagcttgtgcaatagttgtagtacatccctcaaaactccttttacttcttcctccacttctttaacttccactcctaaacccctctcaacttttcatccatggaaaacgtaaccaaatgttcaaagtttcatgcatggttaccaataataacggtgccaaaaccaaaacgttgaaacgaattctgttgatcgaagaaatgttcttcttggcttaggtggtctttatggtgttgctaatgctataccattagctgcatccgctactccatctccacctcctgatctctcgtcttgtagtatagccaggattaacgaactcatgtggtgccgtacagttgttgcgcgcctaagcctgatgatatggagaaagttccgtattacaagttcccttctatgactaaactccgtcagcctgctcatgaagctaatgaggagtatattgccaagtacaatttgggcggttagcaagatgaggggatcttgataagacacaaccttttaaaccctattgg

SEQ ID NO: 274 - DNA, 467 bp, Artificial
  Mutation introduced by TALE nuclease pair POT32_T02 within a POT32 allele
gcaagcttgtgcaatagtagtagtacatctctcaaaactccttttacttcttcctccacttctttaacttccactcctaagccctctcaacttttcatccatggaaaacgtaaccaaatgttcaaagtttcatgcaaggttaccaataataacggtgaccaaaaccaaaacgttgaaacgaattctgttgatcgaagaaatgttcttcttggcttaggtggtctttatggtgttgctaatgctataccattagctgcatccgctgctccagctccacctcctgatctctcgtcttgtagtatagccaggattaacgaaaatcaggtggtgccgtacagttgttgcgcgcctaagcctgatgatatggagaaagttccgtattacaagttcccttctatgactaagctccgtgttgccaagtacaatttggcggttagcaagatgagggatcttgataagacacaacc

SEQ ID NO: 275 - DNA, 503 bp, Artificial
  Mutation introduced by TALE nuclease pair POT32_T02 within a POT32 allele
gcaagcttgtgcaatagtagtagtacatctctcaaaactccttttacttcttcctccacttctttatcttccactcctaagccctctcaacttttcatccatggaaaacgtaaccaaatgttcaaagtttcatgcaaggttaccaataataacggtgaccaaaacgttgaaacgaattctgttgatcgaagaaatgttcttcttggcttaggtggtctttatggtgttgctaatgctataccattagctgcatccgctgctccaactccacctcctgatctctcgtcttgtagtatagccaggattaacgaaaatcaggtggtgccgtacagttgttgcgcgcctaagcctgatgatatggagaaagttccgtattacaagttcccttctatgactaagctcagcctgctcatgaagctaatgaggagtatattgccaagtacaatctggcgattagtcgaatgaagatcttgataagacacaacctttaaaccctattggtt

SEQ ID NO: 276 - DNA, 510 bp, Artificial
  Mutation introduced by TALE nuclease pair POT32_T02 within a POT32 allele
gcaagcttgtgcaatagtagtagtacatccctcaaaactccttttacttcttcctccacttctttaacttccactcctaagcccctctcaacttttcatccatggaaaacgtaaccaaatgttcaaagtttcatgcaaggttatcaataataacggtgaccaaaacgttgaaacgaattctgttgatcgaagaaatgttcttcttggcttaggtggtctttatggtgttgctaatgctataccattagctgcatccgctgctccaactccacctcctgatctctcgtcttgtagtatagccaggattaacgaaaatcaggtggtgccgtacagttgttgcgcgcctaagcctgatgatatggagaaagttccgtattacaagttcccttctatgactaagctcccgtcagcctgctcatgaagctaatgaggagtatattgccaagtacaatctggcgattagtcgaatgagagatcttgataagacacaacctttaaaccctattggtt

SEQ ID NO: 277 - DNA, 509 bp, Artificial
  Mutation introduced by TALE nuclease pair POT32_T02 within a POT32 allele
gcaagcttgtgcaatagtagtagtacatcctcaaaactccttttacttcttcctccacttctttaacttccactcctaaaccctctcaacttttcatccatggaaaacgtaaccaaatgttcaaagtttcatgcatggttaccaataataacggtgaccaaaaccaaaacgttgaaacgaattctgttgatcgaagaaatgttcttcttggcttaggtggtctttatggtgttgctaatgctataccattagctgcatccgctactccatgtccacctcctgatctctcgtcttgtagtatagccaggattaacgaaaactcagtggtgccgtacagttgttgcgcgcctaagcctgatgatatggagaaagttccgtattacaagttcccttctatgactaagctccgtgctgctctgagcataatgaggagtatattgccaagtacaatctggcgattagtcgaatgaaagatcttgataagacacaacctttaaaccctattggtt

SEQ ID NO: 278 - DNA, 507 bp, Artificial
  Mutation introduced by TALE nuclease pair POT32_T02 within a POT32 allele
  misc_feature (158); (470): n is a or c or t or g
gcaagcttgtgcaatagtagtagtacatctctcaaaactccttttacttcttcctccacttctttatcttccactcctaagccctctcaacttttcatccatggaaaacgtaaccaaatgttcaaagtttcatgcaaggttatcaataataacggtgnccaaaacgttgaaacgaattctgttgatcgaagaaatgttcttcttggcttaggtggtctttatggtgttgctaatgctataccattagctgcatccgctgctccaactccacctcctgatctctcgtcttgtagtatagccaggattaacgaaaatcaggtggtgccgtacagttgttgcgcgcctaagcctgatgatatggagaaagttccgtattacaagttcccttctatgactaagctcctcagcctgctcatgaagctaatgaggagtatattgccaagtacaattttgggcggttagcaagatgngggtcttgataagacacaacctttaaaccctattggt

SEQ ID NO: 279 - DNA, 471 bp, Artificial
  Mutation introduced by TALE nuclease pair POT32_T02 within a POT32 allele
gcaagcttgtgcaatagtagtagtacatctctcaaaactccttttacttcttcctccacttctttatcttccactcctaagcccctctcaacttttcatccatggaaaacgtaaccaaatgttcaaagtttcatgcaaggttaccaataataacggtgaccaaaaccaaaacgttgaaacgaattctgttgatcgaagaaatgttcttcttggcttaggtggtctttatggtgttgctaatgctataccattagctgcatccgctgctccagctccacctcctgatctctcgtcttgtagtatagccaggattaacgaaaatcaggtggtgccgtacagttgttgcgcgcctaagcctgatgatatggagaaagttccgtattacaagttcccttctatgactaagctagcctgctcatgaagctaatgaggagtatattgccaagtacaatttggcggttagcaagatga

SEQ ID NO: 280 - DNA, 515 bp, Artificial
  Mutation introduced by TALE nuclease pair POT32_T02 within a POT32 allele
gcaagcttgtgcaatagtagtagtacatctctcaaaactccttttacttcttcctccacttctttatcttccactcctaagcccctctcaacttttcatccatggaaaacgtaaccaaatgttcaaagtttcatgcaaggttaccaataataacggtgaccaaaaccaaaacgttgaaacgaattctgttgatcgaagaaatgttcttcttggcttaggtggtctttatggtgttgctaatgctataccattagctgcatccgctgctccagctccacctcctgatctctcgtcttgtagtatagccaggattaacgaaaatcaggtggtgccgtacagttgttgcgcgcctaagcctgatgatatggagaaagttccgtattacaagttcccttctatgactaagctcctcagcctgctcatgaagctaatgaggagtatattgccaagtacaatttggcggttagcaagatgaggggatcttgataagacacaacctttaaaccctattggtt

SEQ ID NO: 281 - DNA, 506 bp, Artificial
  Mutation introduced by TALE nuclease pair POT32_T02 within a POT32 allele
gcaagcttgtgcaatagtagtagtacatctctcaaaactccttttacttcttcctccacttctttatcttccactcctaagacctctcaacttttcatccatggaaaacgtaaccaaatgttcaaagtttcatgcaaggttatcaataataacggtgaccaaaacgttgaaacgaattctgttgatcgaagaaatgttcttcttggcttaggtggtctttatggtgttgctaatgctataccattagctgcatccgctgctccaactccacctcctgatctctcgtcttgtagtatagccaggattaacgaaaatcaggtggtgccgtacagttgttgcgcgcctaagcctgatgatatggagaaagttccgtattacaagttcccttctatgactaagctccgagcctgctcatgaagctaatgaggagtatattgccaagtacaatctggcgattagtcgaatgagagatcttgataagacacaacctttaaaccctattggtt

SEQ ID NO: 282 - DNA, 475 bp, Artificial
  Mutation introduced by TALE nuclease pair POT32_T02 within a POT32 allele
gcaagcttgtgcaatagttgtagtacatccctcaaaactccttttacttcttcctccacttctttaacttccactcctaaaccctctcaacttttcatccatggaaaacgtaaccaaatgttcaaagtttcatgcatggttaccaataataacggtgaccaaaaccaaaacgttgaaacgaattctgttgatcgaagaaatgttcttcttggcttaggtggtctttatggtgttgctaatgctataccattagctgcatccgctactccatctccacctcctgatctctcgtcttgtagtatagccaggattaacgaaactcatgtggtgccgtacagttgttgcgcgcctaagcctgatgatatggagaaagttccgtattacaagttcccttctatgactaagctccgtcagcctgctcatgaagctaatgaggagtatattgccaagtacaatttggcggttagcaagatga

SEQ ID NO: 283 - DNA, 508 bp, Artificial
  Mutation introduced by TALE nuclease pair POT32_T02 within a POT32 allele
  misc_feature (152); (155): n is a or c or t or g
gcaagcttgtgcaatagtagtagtacatctctcaaaactccttttacttcttcctccacttctttaacttccactcctaagcccctctcaacttttcatccatggaaaacgtaaccaaatgttcaaagtttcatgcagttgctatcaataanagngcgaaccaaaacaagttgaaacgaattctgttgatcgaagaaatgttcttcttggcttaggtggtctttatggtgttgctaatgctataccattagctgcatccgctactccatctccacctcctgatctctcgtcttgtagtatagccaggattaacgaaactcatgtggtgccgtacagttgttgcgcgcctaagcctgatgatatggagaaagttccgtattacaagttcccttctatgactaagctccgcctgctcatgaagctaatgaggagtatattgccaagtacaatctggcgattagtcgaatgaaagatcttgataagacacaacctttaaaccctattggtt

SEQ ID NO: 284 - DNA, 502 bp, Artificial
  Mutation introduced by TALE nuclease pair POT32_T02 within a POT32 allele
gcaagcttgtgcaatagttgtagtacatctctcaaaactccttttacttcttcctccacttctttaacttccactcctaaaccctctcaacttttcatccatggaaaacgtaaccaaatgttcaaagtttcatgcaaggttaccaataataacggtgaccaaaaccaaaacgttgaaacgaattctgttgatcgaagaaatgttcttcttggcttaggtggtctttatggtgttgctaatgctataccattagctgcatccgctactccatctccacctcctgatctctcgtcttgtagtatagccaggattaacgaaactcatgtggtgccgtacagttgttgcgcgcctaagcctgatgatatggagaaagttccgtattacaagttcccttctatgactaagctccgtgctcatgaagctaatgaggagtatattgccaagtacaatttggcggttagcaagatgagggatcttgataagacacaacctttaaacccta

SEQ ID NO: 285 - DNA, 503 bp, Artificial
  Mutation introduced by TALE nuclease pair POT32_T02 within a POT32 allele
gcaagcttgtgcaatagtagtagtacatctctcaaaactccttttacttcttcctccacttctttatcttccactcctaagcccctctcaacttttcatccatggaaaacgtaaccaaatgttcaaagtttcatgcaaggttaccaataataacggtgaccaaaaccaaaacgttgaaacaaattctgttgatcgaagaaatgttcttcttggcttaggtggtctttatggtgttgctaatgctataccattagctgcatccgctgctccagctccacctcctgatctctcgtcttgtagtatagccaggattaacgaaaatcaggtggtgccgtacagttgttgcgcgcctaagcctgatgatatggagaaagttccgtattacaagttcccttctatgactaagcagcctgctcatgaagctaatgaggagtatattgccaagtacaatctggcgattagtcgaatgaaagatcttgataagacacaacctttaaacccta

SEQ ID NO: 286 - DNA, 513 bp, Artificial
  Mutation introduced by TALE nuclease pair POT32_T02 within a POT32 allele
gcaagcttgtgcaatagtagtagtacatctctcaaaactccttttacttcttcctccacttctttaacttccactcctaagccctctcaacttttcatccatggaaaacgtaaccaaatgttcaaagtttcatgcaaggttaccaataataacggtgaccaaaaccaaaacgttgaaacgaattctgttgatcgaagaaatgttcttcttggcttaggtggtctttatggtgttgctaatgctataccattagctgcatccgctgctccagctccacctcctgatctctcgtcttgtagtatagccaggattaacgaaaatcaggtggtgccgtacagttgttgcgcgcctaagcctgatgatatggagaaagttccgtattacaagttcccttctatgactaagctccgcagcctgctcatgaagctaatgaggagtatattgccaagtacaatctggcgattagtcgaatgaaagatcttgataagacacaacctttaaaccctattggtt

SEQ ID NO: 287 - DNA, 459 bp, Artificial
  Mutation introduced by TALE nuclease pair POT32_T02 within a POT32 allele
  misc_feature (264): n is a or c or t or g
gcaagcttgtgcaatagtagtagtacatctctcaaaactccttttacttcttcctccacttctttacttccactcctaaccgcctctcaacttttcatccatggaaaacgtaaccaaatgttcaaagtttcatgcaaggttaccaataataacggtgaccaaaaccaaaacgttgaaacaattctgttgatcgaagaaatgttcttcttggcttaggtggtctttatggtgttgctaatgctataccattagctgcatccgctnctccatgtccacctcctgatctctcgtcttgtagtatagccaggattaacgaaaatcaggtggtgccgtacagttgttgcgcgcctaagcctgatgatatggagaaagttccgtattacaagttcccttctatgactaagctccgtcagcctgctcatgaagctaatgaggagtatattgccaagtacaattgcg

SEQ ID NO: 288 - DNA, 417 bp, Artificial
  Mutation introduced by TALE nuclease pair POT32_T02 within a POT32 allele
gcaagcttgtgcaatagtagtagtacatctctcaaaactccttttacttcttcctccacttctttaacttccactcctaagcccctctcaacttttcatccatggaaaacgtaaccaaatgttcaaagtttcatgcaaggttaccaataataacggtgaccaaaaccaaaacgttgaaacgaattctgttgatcgaagaaatgttcttcttggcttaggtggtctttatggtgttgctaatgctataccattagctgcatccgctgctccagctccacctcctgatctctcgtcttgtagtatagccaggattaacgaaaatcaggtggtgccgtacagttgttgcgcgcctaagtacaatctggcgattagtcgaatgaaagatcttgataagacacaacctttaaaccctattgg

SEQ ID NO: 289 - DNA, 480 bp, Artificial
  Mutation introduced by TALE nuclease pair POT32_T02 within a POT32 allele
gcaagcttgtgcaatagtagtagtacatctctcaaaactccttttacttcttcctccacttctttaacttccactcctaagccctctcaacttttcatccatggaaaacgtaaccaaatgttcaaagtttcatgcaaggttaccaataataacggtgaccaaaaccaaaacgttgaaacgaattctgttgatcgaagaaatgttcttcttggcttaggtggtctttatggtgttgctaatgctataccattagctgcatccgctgctccagctccacctcctgatctctcgtcttgtagtatagccaggattaacgaaaatcaggtggtgccgtacagttgttgcgcgcctaagcctgatgatatggagaaagttccgtattacaagttcccttctatgactaagctccgtgttgccaagtacaatttggcggttagcaagatgagggatcttgataagacacaacctttaaaccctatt

SEQ ID NO: 290 - DNA, 480 bp, Artificial
  Mutation introduced by TALE nuclease pair POT32_T02 within a POT32 allele
gcaagcttgtgcaatagttgtagtacatctctcaaaactccttttacttcttcctccacttctttaacttccactcctaaaccctctcaacttttcatccatggaaaacgtaaccaaatgttcaaagtttcatgcaaggttaccaataataacggtgaccaaaacgttgaaacgaattctgttgatcgaagaaatgttcttcttggcttaggtggtctttatggtgttgctaatgctataccattagctgcatccgctgctccaactccacctcctgatctctcgtcttgtagtatagccaggattaacgaaaatcaggtggtgccgtacagttgttgcgcgcctaagcctgatgatatggagaaagttccgtattacaagttcccttctataagctaatgaggagtatattgccaagtacaatctggcgattagtcgaatgagagatcttgataagacacaacctttaaaccctattgg

SEQ ID NO: 291 - DNA, 514 bp, Artificial
  Mutation introduced by TALE nuclease pair POT32_T02 within a POT32 allele
gcaagcttgtgcaatagtagtagtacatctctcaaaactccttttacttcttcctccacttctttaacttccactcctaagcccctctcaacttttcatccatggaaaacgtaaccaaatgttcaaagtttcatgcaaggttaccaataataacggtgaccaaaaccaaaacgttgaaacgaattctgttgatcgaagaaatgttcttcttggcttaggtggtctttatggtgttgctaatgctataccattagctgcatccgctgctccagctccacctcctgatctctcgtcttgtagtatagccaggattaacgaaaatcaggtggtgccgtacagttgttgcgcgcctaagcctgatgatatggagaaagttccgtattacaagttcccttctatgactaagctcgtcagcctgctcatgaagctaatgaggagtatattgccaagtacaatctggcgattagtcgaatgaaagatcttgataagacacaacctttaaaccctattggtt

SEQ ID NO: 292 - DNA, 502 bp, Artificial
  Mutation introduced by TALE nuclease pair POT32_T02 within a POT32 allele
gcaagcttgtgcaatagtagtagtacatctctcaaaactccttttacttcttcctccacttctttatcttccactcctaagccctctcaacttttcatccatggaaaacgtaaccaaatgttcaaagtttcatgcaaggttaccaataataacggtgaccaaaaccaaaacgttgaaacaaattctgttgatcgaagaaatgttcttcttggcttaggtggtctttatggtgttgctaatgctataccattagctgcatccgctgctccagctccacctcctgatctctcgtcttgtagtatagccaggattaacgaaaatcaggtggtgccgtacagttgttgcgcgcctaagcctgatgatatggagaaagttccgtattacaagttcccttctatgactaagcagcctgctcatgaagctaatgaggagtatattgccaagtacaatctggcgattagtcgaatgaaagatcttgataagacacaacctttaaacccta

SEQ ID NO: 293 - DNA, 445 bp, Artificial
  Mutation introduced by TALE nuclease pair POT32_T02 within a POT32 allele
gcaagcttgtgcaatagttgtagtacatccctcaaaactccttttacttcttcctccacttctttaacttccactcctaaaccctctcaacttttcatccatggaaaacgtaaccaaatgttcaaagtttcatgcatggttaccaataataacggtgaccaaaaccaaaacgttgaaacgaattctgttgatcgaagaaatgttcttcttggcttaggtggtctttatggtgttgctaatgctataccattagctgcatccgctactccatctccacctcctgatctctcgtcttgtagtatagccaggattaacgaaactcatgtggtgccgtacagttgttgcgcgcctatgcctgatgatatggagaaagttccgtattacaatctggcgattagtcgaatgaaagatcttgataagacacaacctttaaaccctattggtt

SEQ ID NO: 294 - DNA, 418 bp, Artificial
  Mutation introduced by TALE nuclease pair POT32_T02 within a POT32 allele
gcaagcttgtgcaatagtagtagtacatctctcaaaactccttttacttcttcctccacttctttatcttccactcctaagcccctctcaacttttcatccatggaaaacgtaaccaaatgttcaaagtttcatgcaaggttactatcaataacagtggactgaaacccaaaacgttgaaacgaattctgttgatcgaagaaatgttcttcttggcttaggtggtctttatggtgttgctaatgctataccattagctgcatccgctgctccaactccacctcctgatctctcgtcttgtagtatagccaggattaacgaaaatcaggtggtgccgtacagttgttgcgcgcctaagcctgatgatatggagaaagttccgtattacaagttcccttctatgacctgctcatgaacgc

SEQ ID NO: 295 - DNA, 488 bp, Artificial
  Mutation introduced by TALE nuclease pair POT32_T02 within a POT32 allele
gcaagcttgtgcaatagtagtagtacatcctcaaaactccttttacttcttcctccacttctttaacttccactcctaaaccctctcaacttttcatccatggaaacgtaaccaaatgttcaaagtttcatgcatggttaccaataataacggtgaccaaaaccaaaacgttgaaacgaattctgttgatcgaagaaatgttcttcttggcttaggtggtctttatggtgttgctaatgctataccattagctgcatccgctactccatctccacctcctgatctctcgtcttgtagtatagccaggattaacgaaactcatgtggtgccgtacagttgttgcgcgcctaagcctgatgatatggagaaagttccgtattacaagttcccttctttgttcgtcagcctgctcatgaagctaatgaggagtatattgccaagtacaattctggcggttagtcagaatgaaggatcttgataagacacaa

SEQ ID NO: 296 - DNA, 498 bp, Artificial
  Mutation introduced by TALE nuclease pair POT32_T02 within a POT32 allele
gcaagcttgtgcaatagtagtagtacatctctcaaaactccttttacttcttcctccacttctttaacttccactcctaagcccctctcaacttttcatccatggaaaacgtaaccaaatgttcaaagtttcatgcaaggttaccaataataacggtgaccaaaaccaaaacgttgaaacgaattctgttgatcgaagaaatgttcttcttggcttaggtggtctttatggtgttgctaatgctataccattagctgcatccgctgctccagctccacctcctgatctctcgtcttgtagtatagccaggattaacgaaaatcaggtggtgccgtacagttgttgcgcgcctaagcctgatgatatggagaaagttccgtattacaagttcccttctatgactaagctccaaggtgctcatgaagctaatgaggagtatattgccaagtacaatctggcgattagtcgaatgaaagatcttgataagacacaaccttt

SEQ ID NO: 297 - DNA, 511 bp, Artificial
  Mutation introduced by TALE nuclease pair POT32_T02 within a POT32 allele
gcaagcttgtgcaatagtagtagtacatctctcaaaactccttttacttcttcctccacttctttaacttccactcctaagcccctctcaacttttcatccatggaaaacgtaaccaaatgttcaaagtttcatgcaaggttaccaataataacggtgaccaaaaccaaaacgttgaaacgaattctgttgatcgaagaaatgttcttcttggcttaggtggtctttatggtgttgctaatgctataccattagctgcatccgctgctccagctccacctcctgatctctcgtcttgtagtatagccaggattaacgaaaatcaggtggtgccgtacagttgttgcgcgcctaagcctgatgatatggagaaagttccgtattacaagttcccttctatgactaagctccgcctgctcatgaagctaatgaggagtatattgccaagtacaatctggcgattagtcgaatgaaagatcttgataagacacaacctttaaaccctattggtt

SEQ ID NO: 298 - DNA, 458 bp, Artificial
  Mutation introduced by TALE nuclease pair POT32_T02 within a POT32 allele
gcaagcttgtgcaatagtgtagtacatctctcaaaactccttttacttcttcctccacttctttacttccactcctaaccctctcaacttttcatccatggaaaacgtaaccaaatgttcaaagtttcatgcaaggttaccaataataacggtgaccaaaaccaaaacgttgaaacgaattctgttgatcgaagaaatgttcttcttggcttaggtggtctttatggtgttgctaatgctataccattagctgcatccgctgctccagctccacctcctgatctctcgtcttgtagtatagccaggattaacgaaaatcaggtggtgccgtacagttgttgcgcgcctaagcctgatgatatggagaaagttccgtattacaagttcccttctatgactaagctccgtctgcctgcctcatgaagctaatgaggagtatattgccaagtacaattgcg

SEQ ID NO: 299 - DNA, 512 bp, Artificial
  Mutation introduced by TALE nuclease pair POT32_T02 within a POT32 allele
gcaagcttgtgcaatagttgtagtacatccctcaaaactccttttacttcttcctccacttctttaacttccactcctaaaccctctcaacttttcatccatggaaaacgtaaccaaatgttcaaagtttcatgcatggttaccaataataacggtgaccaaaaccaaaacgttgaaacgaattctgttgatcgaagaaatgttcttcttggcttaggtggtctttatggtgttgctaatgctataccattagctgcatccgctactccatctccacctcctgatctctcgtcttgtagtatagccaggattaacgaaactcatgtggtgccgtacagttgttgcgcgcctaagcctgatgatatggagaaagttccgtattacaagttcccttctatgactaagctccgtagcctgctcatgaagctaatgaggagtatattgccaagtacaatctggcgattagtcgaatgaaagatcttgataagacacaacctttaaaccctatggtt

SEQ ID NO: 300 - DNA, 457 bp, Artificial
  Mutation introduced by TALE nuclease pair POT32_T02 within a POT32 allele
gcaagcttgtgcaatagtagtagtacatcctctcaaaactccttttacttcttcctccacttctttaacttccactcctaacgcctctcaacttttcatccatggaaaacgtaaccaaatgttcaaagtttcatgcaagttgactaatcaataacagtgacgaaaccaaaaccaagttgaaacgaattctgttgatcgaagaaatgttcttcttggcttaggtggtctttatggtgttgctaatgctataccattagctgcatccgctgctccagctccacctcctgatctctcgtcttgtagtatagccaggattaacgaaaatcagtggtgccgtacagttgttgcgcgcctaagcctgatgatatggagaaagttccgtattacaagttcccttctatgactaagctcagctgctcatgagctaatgaggagtatattgccaagtacaattgcg

SEQ ID NO: 301 - DNA, 511 bp, Artificial
  Mutation introduced by TALE nuclease pair POT32_T02 within a POT32 allele
gcaagcttgtgcaatagtagtagtacatctctcaaaactccttttacttcttcctccacttctttatcttccactcctaagccctctcaacttttcatccatggaaaacgtaaccaaatgttcaaagtttcatgcaaggttaccaataataacggtgaccaaaaccaaaacgttgaaacaaattctgttgatcgaagaaatgttcttcttggcttaggtggtctttatggtgttgctaatgctataccattagctgcatccgctgctccagctccacctcctgatctctcgtcttgtagtatagccaggattaacgaaaatcaggtggtgccgtacagttgttgcgcgcctaagcctgatgatatggagaaagttccgtattacaagttcccttctatgactaagcttcagcctgctcatgaagctaatgaggagtatattgccaagtacaatctggcgattagtcgaatgagagatcttgataagacacaacctttaaaccctattggtt

SEQ ID NO: 302 - DNA, 512 bp, Artificial
  Mutation introduced by TALE nuclease pair POT32_T02 within a POT32 allele
  misc_feature (159): n is a or c or t or g
gcaagcttgtgcaatagttgtagtacatccctcaaaactccttttacttcttcctccacttctttaacttccactcctaaacccctctcaacttttcatccatggaaaacgtaaccaaatgttcaaagtttcatgcatggttaccaataataacggtgnccaaaaccaaaacgttgaaacgaattctgttgatcgaagaaatgttcttcttggcttaggtggtctttatggtgttgctaatgctataccattagctgcatccgctactccatctccacctcctgatctctcgtcttgtagtatagccaggattaacgaaactcatgtggtgccgtacagttgttgcgcgcctaagcctgatgatatggagaaagttccgtattacaagttcccttctatgactaatcgtcagcctgctcatgaagctaatgaggagtatattgccaagtacaatttgggcggttagcaagatgagggtcttgataagacacaacctttaaaccctattggtt

SEQ ID NO: 303 - DNA, 493 bp, Artificial
  Mutation introduced by TALE nuclease pair POT32_T02 within a POT32 allele
gcaagcttgtgcaatagtagtagtacatctctcaaaactccttttacttcttcctccacttctttaacttccactcctaagccctctcaacttttcatccatggaaaacgtaaccaaatgttcaaagtttcatgcatggttaccaataataacggtgaccaaaaccaaaacgttgaaacgaattctgttgatcgaagaaatgttcttcttggcttaggtggtctttatggtgttgctaatgctataccattagctgcatccgctactccatctccacctcctgatctctcgtcttgtagtatagccaggattaacgaaactcatgtggtgccgtacagttgttgcgcgcctaagcctgatgatatggagaaagttccgtattacaagttcccttctatgcctgctcatgaagctaatgaggagtatattgccaagtacaatctggcgattagtcgaatgaaagatcttgataagacacaacctttaaacccta

SEQ ID NO: 304 - DNA, 515 bp, Artificial
  Mutation introduced by TALE nuclease pair POT32_T02 within a POT32 allele
gcaagcttgtgcaatagtagtagtacatctctcaaaactccttttacttcttcctccacttctttatcttccactcctaagcccctctcaacttttcatccatggaaaacgtaaccaaatgttcaaagtttcatgcaaggttaccaataataacggtgaccaaaaccaaaacgttgaaacaaattctgttgatcgaagaaatgttcttcttggcttaggtggtctttatggtgttgctaatgctataccattagctgcatccgctgctccagctccacctcctgatctctcgtcttgtagtatagccaggattaacgaaaatcaggtggtgccgtacagttgttgcgcgcctaagcctgatgatatggagaaagttccgtattacaagttcccttctatgactaagctccgtcagcctgctcatgaagctaatgaggagtatattgccaagtacaatttggcggttagcaagatgagggatcttgataagacacaacctttaaaccctattggtt

SEQ ID NO: 305 - DNA, 515 bp, Artificial
  Mutation introduced by TALE nuclease pair POT32_T02 within a POT32 allele
gcaagcttgtgcaatagttgtagtacatccctcaaaactccttttacttcttcctccacttctttaacttccactcctaaaccctctcaacttttcatccatggaaaacgtaaccaaatgttcaaagtttcatgcatggttaccaataataacggtgaccaaaaccaaaacgttgaaacgaattctgttgatcgaagaaatgttcttcttggcttaggtggtctttatggtgttgctaatgctataccattagctgcatccgctactccatctccacctcctgatctctcgtcttgtagtatagccaggattaacgaaactcatgtggtgccgtacagttgttgcgcgcctaagcctgatgatatggagaaagttccgtattacaagttcccttctatgactaagctccggtcagcctgctcatgaagctaatgaggagtatattgccaagtacaatctggcgattagtcgaatgaaagatcttgataagacacaacctttaaaccctattggtt

SEQ ID NO: 306 - DNA, 474 bp, Artificial
  Mutation introduced by TALE nuclease pair POT32_T02 within a POT32 allele
gcaagcttgtgcaatagttgtagtacatctctcaaaactccttttacttcttcctccacttctttaacttccactcctaaaccctctcaacttttcatccatggaaaacgtaaccaaatgttcaaagtttcatgcaaggttaccaataataacggtgaccaaaaccaaaacgttgaaacgaattctgttgatcgaagaaatgttcttcttggcttaggtggtctttatggtgttgctaatgctataccattagctgcatccgctactccatctccacctcctgatctctcgtcttgtagtatagccaggattaacgaaactcatgtggtgccgtacagttgttgcgcgcctaagcctgatgatatggagaaagttccgtattacaagttcccttctatgactaagctccgcagcctgctcatgaagctaatgaggagtatattgccaagtacaatttggcggttagcaagatga

SEQ ID NO: 307 - DNA, 513 bp, Artificial
  Mutation introduced by TALE nuclease pair POT32_T02 within a POT32 allele
gcaagcttgtgcaatagtagtagtacatctctcaaaactccttttacttcttcctccacttctttatcttccactcctaagcccctctcaacttttcatccatggaaaacgtaaccaaatgttcaaagtttcatgcaaggttaccaataataacggtgaccaaaaccaaaacgttgaaacaaattctgttgatcgaagaaatgttcttcttggcttaggtggtctttatggtgttgctaatgctataccattagctgcatccgctgctccagctccacctcctgatctctcgtcttgtagtatagccaggattaacgaaaatcaggtggtgccgtacagttgttgcgcgcctaagcctgatgatatggagaaagttccgtattacaagttcccttctatgactaagcggtcagcctgctcatgaagctaatgaggagtatattgccaagtacaatctggcgattagtcgaatgaaagatcttgataagacacaacctttaaaccctattggtt

SEQ ID NO: 308 - DNA, 512 bp, Artificial
  Mutation introduced by TALE nuclease pair POT32_T02 within a POT32 allele
  misc_feature (265): n is a or c or t or g
gcaagcttgtgcaatagtagtagtacatctctcaaaactccttttacttcttcctccacttctttaacttccactcctaaaccctctcaacttttcatccatggaaaacgtaaccaaatgttcaaagtttcatgcaaggttaccaataataacggtgaccaaaaccaaaacgttgaaacgaattctgttgatcgaagaaatgttcttcttggcttaggtggtctttatggtgttgctaatgctataccattagctgcatccgctnctccatctccacctcctgatctctcgtcttgtagtatagccaggattaacgaaaactcagtggtgccgtacagttgttgcgcgcctaagcctgatgatatggagaaagttccgtattacaagttcccttctatgactaagctctcagcctgctcatgaagctaatgaggagtatattgccaagtacaatctggcgattagtcgaatgagagatcttgataagacacaacctttaaaccctattggtt

SEQ ID NO: 309 - DNA, 510 bp, Artificial
  Mutation introduced by TALE nuclease pair POT32_T02 within a POT32 allele
gcaagcttgtgcaatagtagtagtacatctctcaaaactccttttacttcttcctccacttctttaacttccactcctaagccctctcaacttttcatccatggaaaacgtaaccaaatgttcaaagtttcatgcaaggttaccaataataacggtgaccaaaaccaaaacgttgaaacgaattctgttgatcgaagaaatgttcttcttggcttaggtggtctttatggtgttgctaatgctataccattagctgcatccgctgctccagctccacctcctgatctctcgtcttgtagtatagccaggattaacgaaaatcaggtggtgccgtacagttgttgcgcgcctaagcctgatgatatggagaaagttccgtattacaagttcccttctatgactaagctccgcctgctcatgaagctaatgaggagtatattgccaagtacaatctggcgattagtcgaatgaaagatcttgataagacacaacctttaaaccctattggtt

SEQ ID NO: 310 - DNA, 512 bp, Artificial
  Mutation introduced by TALE nuclease pair POT32_T02 within a POT32 allele
  misc_feature (424): n is a or c or t or g
gcaagcttgtgcaatagtagtagtacatctctcaaaactccttttacttcttcctccacttctttaacttccactcctaagcccctctcaacttttcatccatggaaaacgtaaccaaatgttcaaagtttcatgcaaggttaccaataataacggtgaccaaaaccaaaacgttgaaacaaattctgttgatcgaagaaatgttcttcttggcttaggtggtctttatggtgttgctaatgctataccattagctgcatccgctgctccagctccacctcctgatctctcgtcttgtagtatagccaggattaacgaaaatcaggtggtgccgtacagttgttgcgcgcctaagcctgatgatatggagaaagttccgtattacaagttcccttctatgactaagctctgctgctcatgactntcataatgaggagtatattgccaagtacaatctggcgattagtcgaatgaagatcttgataagacacaacctttaaaccctattggtt

SEQ ID NO: 311 - DNA, 509 bp, Artificial
  Mutation introduced by TALE nuclease pair POT32_T02 within a POT32 allele
gcaagcttgtgcaatagtagtagtacatctctcaaaactccttttacttcttcctccacttctttatcttccactcctaagcccctctcaacttttcatccatggaaaacgtaaccaaatgttcaaagtttcatgcaaggttatcaataataacggtgaccaaaacgttgaaacgaattctgttgatcgaagaaatgttcttcttggcttaggtggtctttatggtgttgctaatgctataccattagctgcatccgctgctccagctccacctcctgatctctcgtcttgtagtatagccaggattaacgaaaatcaggtggtgccgtacagttgttgcgcgcctaagcctgatgatatggagaaagttccgtattacaagttcccttctatgactaagctccgtgagcctgctcatgaagctaatgaggagtatattgccaagtacaatctggcgattagtcgaatgaaagatcttgataagacacaacctttaaaccctattggtt

SEQ ID NO: 312 - DNA, 415 bp, Artificial
  Mutation introduced by TALE nuclease pair POT32_T02 within a POT32 allele
gcaagcttgtgcaatagtagtagtacatctctcaaaactccttttacttcttcctccacttctttaacttccactcctaagccctctcaacttttcatccatggaaaacgtaaccaaatgttcaaagtttcatgcaaggttaccaataataacggtgaccaaaaccaaaacgttgaaacgaattctgttgatcgaagaaatgttcttcttggcttaggtggtctttatggtgttgctaatgctataccattagctgcatccgctgctccagctccacctcctgatctctcgtcttgtagtatagccaggattaacgaaaatcaggtggtgccgtacagttgttgcgcgcctaagtacaatctggcgattagtcgaatgaaagatcttgataagacacacctttaaaccctattgg

SEQ ID NO: 313 - DNA, 454 bp, Artificial
  Mutation introduced by TALE nuclease pair POT32_T02 within a POT32 allele
gcaagcttgtgcaatagtagtagtacatctctcaaaactccttttacttcttcctccacttctttatcttccactcctaagccctctcaacttttcatccatggaaaacgtaaccaaatgttcaaagtttcatgcaaggttaccaataataacggtgaccaaaaccaaaacgttgaaacgaattctgttgatcgaagaaatgttcttcttggcttaggtggtttttatggtgttgctaatgctataccattagctgcatccgctactccatctccacctcctgatctctcgtcttgtagtatagcccaggattaacgaaactcatgtggtgccgtacagttgttgcgcgcctaagcctgatgatatgggagaaagttccgtattacaagttcccttctatgactaagctccagcctgctcatgaagctaatgaggagtatattgccaagtacaa

SEQ ID NO: 314 - DNA, 461 bp, Artificial
  Mutation introduced by TALE nuclease pair POT32_T02 within a POT32 allele
  misc_feature (266): n is a or c or t or g
gcaagcttgtgcaatagtagtagtacatctctcaaaactccttttacttcttcctccacttctttaacttccactcctaaccgcctctcaacttttcatccatggaaaacgtaaccaaatgttcaaagtttcatgcaaggttaccaataataacggtgaccaaaaccaaaacgttgaaacaaattctgttgatcgaagaaatgttcttcttggcttaggtggtctttatggtgttgctaatgctataccattagctgcatccgctnctccatgtccacctcctgatctctcgtcttgtagtatagccaggattaacgaaaatcaggtggtgccgtacagttgttgcgcgcctaagcctgatgatatggagaaagttccgtattacaagttcccttctatgactaagctccgtcagcctgctcatgaagctaatgaggagtatattgccaagtacaattgcg

SEQ ID NO: 315 - DNA, 481 bp, Artificial
  Mutation introduced by TALE nuclease pair POT32_T02 within a POT32 allele
gcaagcttgtgcaatagtagtagtacatctctcaaaactccttttacttcttcctccacttctttatcttccactcctaagcccctctcaacttttcatccatggaaaacgtaaccaaatgttcaaagtttcatgcaaggttatcaataataacggtgaccaaaacgttgaaacgaattctgttgatcgaagaaatgttcttcttggcttaggtggtctttatggtgttgctaatgctataccattagctgcatccgctgctccaactccacctcctgatctctcgtcttgtagtatagccaggattaacgaaaatcaggtggtgccgtacagttgttgcgcgcctaagcctgatgatatggagaaagttccgtattacaagttcccttctatgactaagctaatgaggagtatattgccaagtacaatctggcgattagtcgaatgagagatcttgataagacacaacctttaaacccta

SEQ ID NO: 316 - DNA, 510 bp, Artificial
  Mutation introduced by TALE nuclease pair POT32_T02 within a POT32 allele
gcaagcttgtgcaatagtagtagtacatctctcaaaactccttttacttcttcctccacttctttaacttccactcctaagcccctctcaacttttcatccatggaaaacgtaaccaaatgttcaaagtttcatgcaaggttatcaataataacggtgaccaaaacgttgaaacgaattctgttgatcgaagaaatgttcttcttggcttaggtggtctttatggtgttgctaatgctataccattagctgcatccgctgctccaactccacctcctgatctctcgtcttgtagtatagccaggattaacgaaaatcaggtggtgccgtacagttgttgcgcgcctaagcctgatgatatggagaaagttccgtattacaagttcccttctatgactaagctccgttcagcctgctcatgaagctaatgaggagtatattgccaagtacaatttggcggttagcaagatgagggatcttgataagacacaacctttaaaccctattggtt

SEQ ID NO: 317 - DNA, 509 bp, Artificial
  Mutation introduced by TALE nuclease pair POT32_T02 within a POT32 allele
  misc_feature (411): n is a or c or t or g
gcaagcttgtgcaatagtagtagtacatctctcaaaactccttttacttcttcctccacttctttatcttccactcctaagcccctctcaacttttcatccatggaaaacgtaaccaaatgttcaaagtttcatgcaaggttatcaataataacggtgaccaaaacgttgaaacgaattctgttgatcgaagaaatgttcttcttggcttaggtggtctttatggtgttgctaatgctataccattagctgcatccgctgctccaactccacctcctgatctctcgtcttgtagtatagccaggattaacgaaaatcaggtggtgccgtacagttgttgcgcgcctaagcctgatgatatggagaaagttccgtattacaagttcccttctatgactaagctcgtcgtgcncctgctatgaagctaatgaggagtatattgccaagtacaatctggcgattagtcgaatgaagatcttgataagacacaacctttaaaccctattggtt

SEQ ID NO: 318 - DNA, 468 bp, Artificial
  Mutation introduced by TALE nuclease pair POT32_T02 within a POT32 allele
gcaagcttgtgcaatagtagtagtacatctctcaaaactccttttacttcttcctccacttctttaacttccactcctaagccctctcaacttttcatccatggaaaacgtaaccaaatgttcaaagtttcatgcaaggttaccaataataacggtgaccaaaaccaaaacgttgaaacaaattctgttgatcgaagaaatgttcttcttggcttaggtggtctttatggtgttgctaatgctataccattagctgcatccgctgctccagctccacctcctgatctctcgtcttgtagtatagccaggattaacgaaaatcaggtggtgccgtacagttgttgcgcgcctaagcctgatgatatggagaaagttccgtattacaagttcccttctatgactaagctccgtcgtgccagtcctgctcatgaagctaaatgagggagtatattgccaagtacaattgcg

SEQ ID NO: 319 - DNA, 475 bp, Artificial
  Mutation introduced by TALE nuclease pair POT32_T02 within a POT32 allele
gcaagcttgtgcaatagtagtagtacatccctcaaaactccttttacttcttcctccacttctttaacttccactcctaaaccctctcaacttttcatccatggaaaacgtaaccaaatgttcaaagtttcatgcatggttaccaataataacggtgaccaaaaccaaaacgttgaaacgaattctgttgatcgaagaaatgttcttcttggcttaggtggtctttatggtgttgctaatgctataccattagctgcatccgctactccatctccacctcctgatctctcgtcttgtagtatagccaggattaacgaaactcatgtggtgccgtacagttgttgcgcgcctaagcctgatgatatggagaaagttccgtattacaagttcccttctatgactaagctccgtcagcctgctcatgaagctaatgaggagtatattgccaagtacaatttggcggttagcaagatga

SEQ ID NO: 320 - DNA, 460 bp, Artificial
  Mutation introduced by TALE nuclease pair POT32_T02 within a POT32 allele
gcaagcttgtgcaatagttgtagtacatccctcaaaactccttttacttcttcctccacttctttatcttccacctccataacgcctctcaacttttcatccatggaaaacgtaaccaaatgttcaaagtttcatgcaaggttaccaataataacggtgaccaaaaccaaaacgttgaaacgaattctgttgatcgaagaaatgttcttcttggcttaggtggtctttatggtgttgctaatgctataccattagctgcatccgctgctccagctccacctcctgatctctcgtcttgtagtatagccaggattaacgaaaatcaggtggtgccgtacagttgttgcgcgcctaagcctgatgatatggagaaagttccgtattacaagttcccttctatgactaagctccgtcagcctgctcatgaagctaatgaggagtatattgccaagtacaattt

SEQ ID NO: 321 - DNA, 514 bp, Artificial
  Mutation introduced by TALE nuclease pair POT32_T02 within a POT32 allele
gcaagcttgttgcaatagtagtagtacatctctcaaacatccttttacttcttcctccacttctttaacttccactcctaagcccctctcaacttttcatccatggaaaacgtaaccaaatgttcaaagtttcatgcaaggttaccaataataacggtgaccaaaaccaaaacgttgaaacgaattctgttgatcgaagaaatgttcttcttggcttaggtggtctttatggtgttgctaatgctataccattagctgcatccgctgctccagctccacctcctgatctctcgtcttgtagtatagccaggattaacgaaaatcaggtggtgccgtacagttgttgcgcgcctaagcctgatgatatggagaaagttccgtattacaagttcccttctatgactaagctccgtcagcctgctcatgaagctaatgaggagtatattgccaagtacaatctggcgattagtcgaatgaaagatcttgataagacacaacctttaaaccctattgg

SEQ ID NO: 322 - DNA, 476 bp, Artificial
  Mutation introduced by TALE nuclease pair POT32_T02 within a POT32 allele
  misc_feature (159): n is a or c or t or g
gcaagcttgtgcaatagttgtagtacatccctcaaaactccttttacttcttcctccacttctttaacttccactcctaaacccctctcaacttttcatccatggaaaacgtaaccaaatgttcaaagtttcatgcatggttaccaataataacggtgnccaaaaccaaaacgttgaaacgaattctgttgatcgaagaaatgttcttcttggcttaggtggtctttatggtgttgctaatgctataccattagctgcatccgctactccatctccacctcctgatctctcgtcttgtagtatagccaggattaacgaaactcatgtggtgccgtacagttgttgcgcgcctaagcctgatgatatggagaaagttccgtattacaagttcccttctatgactaagctccgccagcctgctcatgaagctaatgaggagtatattgccaagtacaatttggcggttagcaagatga

SEQ ID NO: 323 - DNA, 517 bp, Artificial
  Mutation introduced by TALE nuclease pair POT32_T02 within a POT32 allele
gcaagcttgtgcaatagtagtagtacatctctcaaaactccttttacttcttcctccacttctttatcttccactcctaagcccctctcaacttttcatccatggaaaacgtaaccaaatgttcaaagtttcaattgcaaggttatacgtaataataacggatggacccaaaacgttgaaacgaattctgttgatcgaagaaatgttcttcttggcttaggtggtctttatggtgttgctaatgctataccattagctgcatccgctgctccaactccacctcctgatctctcgtcttgtagtatagccaggattaacgaaaatcaggtggtgccgtacagttgttgcgcgcctaagcctgatgatatggagaaagttccgtattacaagttcccttctatgactaagctccgtcagcctgctcatgaagctaatgaggagtatattgccaagtacaatcttgcgattagtcgaatgagagatcttgataagacacaacctttaaaccctattggtt

SEQ ID NO: 324 - DNA, 513 bp, Artificial
  Mutation introduced by TALE nuclease pair POT32_T02 within a POT32 allele
gcaagcttgtgcaatagttgtagtacatccctcaaaactccttttacttcttcctccacttctttaacttccactcctaaaccctctcaacttttcatccatggaaaacgtaaccaaatgttcaaagtttcatgcatggttaccaataataacggtgaccaaaaccaaaacgttgaaacgaattctgttgatcgaagaaatgttcttcttggcttaggtggtctttatggtgttgctaatgctataccattagctgcatccgctactccatctccacctcctgatctctcgtcttgtagtatagccaggattaacgaaactcatgtggtgccgtacagttgttgcgcgcctaagcctgatgatatggagaaagttccgtattacaagttcccttctatgactaagctccgtgtgctgctcatgaagctaatgaggagtatattgccaagtacaatttggcggttagcaagatgagggatcttgataagacacaacctttaaaccctattggtt

SEQ ID NO: 325 - DNA, 513 bp, Artificial
  Mutation introduced by TALE nuclease pair POT32_T02 within a POT32 allele
gcaagcttgtgcaatagtagtagtacatctctcaaaactccttttacttcttcctccacttctttaacttccactcctaagccctctcaacttttcatccatggaaaacgtaaccaaatgttcaaagtttcatgcaaggttaccaataataacggtgaccaaaaccaaaacgttgaaacgaattctgttgatcgaagaaatgttcttcttggcttaggtggtctttatggtgttgctaatgctataccattagctgcatccgctgctccagctccacctcctgatctctcgtcttgtagtatagccaggattaacgaaaatcaggtggtgccgtacagttgttgcgcgcctaagcctgatgatatggagaaagttccgtattacaagttcccttctatgactaagctccgtagcctgctcatgaagctaatgaggagtatattgccaagtacaatttggcggttagcaagatgagggatcttgataagacacaacctttaaaccctattggtt

SEQ ID NO: 326 - DNA, 515 bp, Artificial
  Mutation introduced by TALE nuclease pair POT32_T02 within a POT32 allele
gcaagcttgtgcaatagttgtagtacatctctcaaaactccttttacttcttcctccacttctttaacttccactcctaaaccctctcaacttttcatccatggaaaacgtaaccaaatgttcaaagtttcatgcaaggttaccaataataacggtgaccaaaaccaaaacgttgaaacgaattctgttgatcgaagaaatgttcttcttggcttaggtggtctttatggtgttgctaatgctataccattagctgcatccgctactccatctccacctcctgatctctcgtcttgtagtatagccaggattaacgaaactcatgtggtgccgtacagttgttgcgcgcctaagcctgatgatatggagaaagttccgtattacaagttcccttctatgactaagctcccgtcagcctgctcatgaagctaatgaggagtatattgccaagtacaatctggcgattagtcgaatgaaagatcttgataagacacaacctttaaaccctattggtt

SEQ ID NO: 327 - DNA, 471 bp, Artificial
  Mutation introduced by TALE nuclease pair POT32_T02 within a POT32 allele
gcaagcttgtgcaatagtagtagtacatctctcaaaactccttttacttcttcctccacttctttatcttccactcctaagccctctcaacttttcatccatggaaaacgtaaccaaatgttcaaagtttcatgcaaggttaccaataataacggtgaccaaaaccaaaacgttgaaacaaattctgttgatcgaagaaatgttcttcttggcttaggtggtctttatggtgttgctaatgctataccattagctgcatccgctgctccagctccacctcctgatctctcgtcttgtagtatagccaggattaacgaaaatcaggtggtgccgtacagttgttgcgcgcctaagcctgatgatatggagaaagttccgtattacaagttcccttctatgactaagctccgcctgctcatgaagctaatgaggagtatattgccaagtacaatttggcggttagcaagatga

SEQ ID NO: 328 - DNA, 476 bp, Artificial
  Mutation introduced by TALE nuclease pair POT32_T02 within a POT32 allele
gcaagcttgtgcaatagtagtagtacatctctcaaaactccttttacttcttcctccacttctttatcttccactcctaagccctctcaacttttcatccatggaaaacgtaaccaaatgttcaaagtttcatgcaaggttaccaataataacggtgaccaaaaccaaaacgttgaaacgaattctgttgatcgaagaaatgttcttcttggcttaggtggtctttatggtgttgctaatgctataccattagctgcatccgctgctccagctccacctcctgatctctcgtcttgtagtatagccaggatttaacgaaaatcaggtggtgccgtacagttgttgcgcgcctaagcctgatgatatggagaaagttccgtattacaagttcccttctatgactaagctccgtcagcctgctcatgaagctaatgaggagtatattgccaagtacaatttggcggttagcaagatga

SEQ ID NO: 329 - DNA, 453 bp, Artificial
  Mutation introduced by TALE nuclease pair POT32_T02 within a POT32 allele
gcaagcttgtgcaatagtagtagtacatctctcaaaactcctttttacttcttcctccacttctttatcttccactcctaagccctctcaacttttcatccatggaaaacgtaaccaaatgttcaaagtttcatgcaaggttaccaataataacggtgaccaaaaccaaaacgttgaaacgaattctgttgatcgaagaaatgttcttcttggcttaggtggtttttatggtgttgctaatgctataccattagctgcatccgctactccatctccacctcctgatctctcgtcttgtagtatagccaggattaacgaaactcatgtggtgccgtacagttgttgcgcgcctaagcctgatgatatggagaaagttccgtattacaagttcccttctatgactaagctccagcctgctcatgaagctaatgaggagtatattgccaagtacaa

SEQ ID NO: 330 - DNA, 512 bp, Artificial
  Mutation introduced by TALE nuclease pair POT32_T02 within a POT32 allele
gcaagcttgtgcaatagtagtagtacatctctcaaaactccttttacttcttcctccacttctttacttccactcctaagcccctctcaacttttcatccatggaaaacgtaaccaaatgttcaaagtttcatgcaaggttaccaataataacggtgaccaaaaccaaaacgttgaaacaaattctgttgatcgaagaaatgttcttcttggcttaggtggtctttatggtgttgctaatgctataccattagctgcatccgctgctccagctccacctcctgatctctcgtcttgtagtatagccaggattaacgaaaatcaggtggtgccgtacagttgttgcgcgcctaagcctgatgatatggagaaagttccgtattacaagttcccttctatgactaagctgtcagcctgctcatgaagctaatgaggagtatattgccaagtacaatctggcgattagtcgaatgaaagatcttgataagacacaacctttaaaccctattggtt

SEQ ID NO: 331 - DNA, 512 bp, Artificial
  Mutation introduced by TALE nuclease pair POT32_T02 within a POT32 allele
gcaagcttgtgcaatagtagtagtacatcctcaaaactccttttacttcttcctccacttctttaacttccactcctaaacccctctcaacttttcatccatggaaaacgtaaccaaatgttcaaagtttcatgcatggttaccaataataacggtgaccaaaaccaaaacgttgaaacgaattctgttgatcgaagaaatgttcttcttggcttaggtggtctttatggtgttgctaatgctataccattagctgcatccgctactccatctccacctcctgatctctcgtcttgtagtatagccaggattaacgaaactcatgtggtgccgtacagttgttgcgcgcctaagcctgatgatatggagaaagttccgtattacaagttcccttctatgactaagctccagcctgctcatgaagctaatgagggagtatattgccaagtacaatctggcgattagtcgaatgaaagatcttgataagacacaacctttaaaccctattggtt

SEQ ID NO: 332 - DNA, 508 bp, Artificial
  Mutation introduced by TALE nuclease pair POT32_T02 within a POT32 allele
gcaagcttgtgcaatagtagtagtacatctctcaaaactccttttacttcttcctccacttctttaacttccactcctaagccctctcaacttttcatccatggaaaacgtaaccaaatgttcaaagtttcatgcaaggttaccaataataacggtgaccaaaaccaaaacgttgaaacgaattctgttgatcgaagaaatgttcttcttggcttaggtggtctttatggtgttgctaatgctataccattagctgcatccgctgctccagctccacctcctgatctctcgtcttgtagtatagccaggattaacgaaaatcaggtggtgccgtacagttgttgcgcgcctaagcctgatgatatggagaaagttccgtattacaagttcccttctatgactaagctccgtcagcctgctcatgaagctaatgaggggtatattgccaagtacaattggcggttagcaagatgaggggatcttgataagacacaacctttaaacacta

SEQ ID NO: 333 - DNA, 513 bp, Artificial
  Mutation introduced by TALE nuclease pair POT32_T02 within a POT32 allele
gcaagcttgtgcaatagttgtagtacatccctcaaaactccttttacttcttcctccacttctttaacttccactcctaaaccctctcaacttttcatccatggaaaacgtaaccaaatgttcaaagtttcatgcatggttaccaataataacggtgaccaaaaccaaaacgttgaaacgaattctgttgatcgaagaaatgttcttcttggcttaggtggtctttatggtgttgctaatgctataccattagctgcatccgctactccatctccacctcctgatctctcgtcttgtagtatagccaggattaacgaaactcatgtggtgccgtacagttgttgcgcgcctaagcctgatgatatggagaaagttccgtattacaagttcccttctatgactaagctccgtgtgctcctcatgaagctaatgaggagtatattgccaagtacaatttggcggttagcaagatgagggatcttgataagacacaacctttaaaccctattggtt

SEQ ID NO: 334 - DNA, 492 bp, Artificial
  Mutation introduced by TALE nuclease pair POT32_T02 within a POT32 allele
gcaagcttgtgcaatagtagtagtacatctctcaaaactccttttacttcttcctccacttctttaacttccactcctaaaccctctcaacttttcatccatggaaaacgtaaccaaatgttcaaagtttcatgcaaggttaccaataataacggtgaccaaaaccaaaacgttgaaacgaattctgttgatcgaagaaatgttcttcttggcttaggtggtctttatggtgttgctaatgctataccattagctgcatccgctactccatctccacctcctgatctctcgtcttgtagtatagccaggattaacgaaactcatgtggtgccgtacagttgttgcgcgcctaagcctgatgatatggagaaagttccgtattacaagttcccttctatgactaatgaagctaatgaggagtatattgccaagtacaatttggcggttagcaagatgagggatcttgataagacacaacctttaaaccctatt

SEQ ID NO: 335 - DNA, 484 bp, Artificial
  Mutation introduced by TALE nuclease pair POT32_T02 within a POT32 allele
gcaagcttgtgcaatagtagtagtacatctctcaaaactccttttacttcttcctccacttctttatcttccactcctaagccctctcaacttttcatccatggaaaacgtaaccaaatgttcaaagtttcatgcaaggttaccaataataacggtgaccaaaaccaaaacgttgaaacaaattctgttgatcgaagaaatgttcttcttggcttaggtggtctttatggtgttgctaatgctataccattagctgcatccgctgctccagctccacctcctgatctctcgtcttgtagtatagccaggattaacgaaaatcaggtggtgccgtacagttgttgcgcgcctaagcctgatgatatggagaaagttccgtattacaagttcccttctatgacagcctgctcatgaagctaatgaggagtatattgccaagtacaatttggcggttagcaagatgagggatcttgataagacacaa

SEQ ID NO: 336 - DNA, 514 bp, Artificial
  Mutation introduced by TALE nuclease pair POT32_T02 within a POT32 allele
gcaagcttgtgcaatagtagtagtacatctctcaaaactccttttacttcttcctccacttctttaacttccactcctaagcccctctcaacttttcatccatggaaaacgtaaccaaatgttcaaagtttcatgcaaggttaccaataataacggtgaccaaaaccaaaacgttgaaacgaattctgttgatcgaagaaatgttcttcttggcttaggtggtctttatggtgttgctaatgctataccattagctgcatccgctgctccagctccacctcctgatctctcgtcttgtagtatagccaggattaacgaaaatcaggtggtgccgtacagttgttgcgcgcctaagcctgatgatatggagaaagttccgtattacaagttcccttctatgactaagctcgtcagcctgctcatgaagctaatgaggagtatattgccaagtacaatttggcggttagcaagatgagggatcttgataagacacaacctttaaaccctattggtt

SEQ ID NO: 337 - DNA, 472 bp, Artificial
  Mutation introduced by TALE nuclease pair POT32_T02 within a POT32 allele
gcaagcttgtgcaatagtagtagtacatctctcaaaactccttttacttcttcctccacttctttatcttccactcctaagcccctctcaacttttcatccatggaaaacgtaaccaaatgttcaaagtttcatgcaaggttaccaataataacggtgaccaaaaccaaaacgttgaaacaaattctgttgatcgaagaaatgttcttcttggcttaggtggtctttatggtgttgctaatgctataccattagctgcatccgctgctccagctccacctcctgatctctcgtcttgtagtatagccaggattaacgaaaatcaggtggtgccgtacagttgttgcgcgcctaagcctgatgatatggagaaagttccgtattacaagttcccttctatgactaagctccgcctgctcatgaagctaatgaggagtatattgccaagtacaatttggcggttagcaagatga

SEQ ID NO: 338 - DNA, 504 bp, Artificial
  Mutation introduced by TALE nuclease pair POT32_T02 within a POT32 allele
gcaagcttgtgcaatagtagtagtacatctctcaaaactccttttacttcttcctccacttctttatcttccactcctaagcccctctcaacttttcatccatggaaaacgtaaccaaatgttcaaagtttcatgcaaggttaccaataataacggtgaccaaaaccaaaacgttgaaacaaattctgttgatcgaagaaatgttcttcttggcttaggtggtctttatggtgttgctaatgctataccattagctgcatccgctgctccagctccacctcctgatctctcgtcttgtagtatagccaggattaacgaaaatcaggtggtgccgtacagttgttgcgcgcctaagcctgatgatatggagaaagttccgtattacaagttcccttctatgactaagccagcctgctcatgaagctaatgaggagtatattgccaagtacaatctggcgattagtcgaatgaaagatcttgataagacacaacctttaaacccta

SEQ ID NO: 339 - DNA, 491 bp, Artificial
  Mutation introduced by TALE nuclease pair POT32_T02 within a POT32 allele
gcaagcttgtgcaatagtagtagtacatctctcaaaactccttttacttcttcctccacttctttatcttccactcctaaaccctctcaacttttcatccatggaaaacgtaaccaaatgttcaaagtttcatgcatggttaccaataataacggtgaccaaaaccaaaacgttgaaacgaattctgttgatcgaagaaatgttcttcttggcttaggtggtctttatggtgttgctaatgctataccattagctgcatccgctactccatctccacctcctgatctctcgtcttgtagtatagccaggattaacgaaactcatgtggtgccgtacagttgttgcgcgcctaagcctgatgatatggagaaagttccgtattacaagtcttcgtcagcctgctcatgaagctaatgaggagtatattgccaagtacaatctggcgattagtcgaatgaaagatcttgataagacacaacctttaaacccta

SEQ ID NO: 340 - DNA, 515 bp, Artificial
  Mutation introduced by TALE nuclease pair POT32_T02 within a POT32 allele
gcaagcttgtgcaatagtagtagtacatctctcaaaactccttttacttcttcctccacttctttaacttccactcctaagcccctctcaacttttcatccatggaaaacgtaaccaaatgttcaaagtttcatgcaaggttaccaataataacggtgaccaaaaccaaaacgttgaaacgaattctgttgatcgaagaaatgttcttcttggcttaggtggtctttatggtgttgctaatgctataccattagctgcatccgctgctccagctccacctcctgatctctcgtcttgtagtatagccaggattaacgaaaatcaggtggtgccgtacagttgttgcgcgcctaagcctgatgatatggagaaagttccgtattacaagttcccttctatgactaagctccgtcagcctgctcatgaagctaatgaggagtatattgccaagtacaatctggcgattagtcgaatgaaagatcttgataagacacaacctttaaaccctattggtt

SEQ ID NO: 341 - DNA, 481 bp, Artificial
  Mutation introduced by TALE nuclease pair POT32_T02 within a POT32 allele
  misc_feature (160): n is a or c or t or g
gcaagcttgtgcaatagtagtagtacatctctcaaaactccttttacttcttcctccacttctttatcttccactcctaagccccctctcaacttttcatccatggaaaacgtaaccaaatgttcaaagtttcatgcaaggttatcaataataacggtgnccaaacgttgaaacgaattctgttgatcgaagaaatgttcttcttggcttaggtggtctttatggtgttgctaatgctataccattagctgcatccgctgctccaactccacctcctgatctctcgtcttgtagtatagccaggattaacgaaaatcaggtggtgccgtacagttgttgcgcgcctaagcctgatgatatggagaaagttccgtattacaagttcccttctatgactaagctccagcctgctatgaagctaatgaggagtatattgccaagtacaactgggcgattagtcgaataaagatcttgataagac

SEQ ID NO: 342 - DNA, 505 bp, Artificial
  Mutation introduced by TALE nuclease pair POT32_T02 within a POT32 allele
gcaagcttgtgcaatagtagtagtacatcctcaaaactccttttacttcttcctccacttctttatcttccactcctaagcccctctcaacttttcatccatggaaaacgtaaccaaatgttcaaagtttcatgcaaggttatcaataataacggtgaccaaaacgttgaaacgaattctgttgatcgaagaaatgttcttcttggcttaggtggtctttatggtgttgctaatgctataccattagctgcatccgctgctccaactccacctcctgatctctcgtcttgtagtatagccaggattaacgaaaatcaggtggtgccgtacagttgttgcgcgcctaagcctgatgatatggagaaagttccgtattacaagttcccttctatgactaagcttcagcctgctcatgaagctaatgaggagtatattgccaagtacaatctggcgattagtcgaatgagagatcttgataagacacaacctttaaaccctattggtt

SEQ ID NO: 343 - DNA, 464 bp, Artificial
  Mutation introduced by TALE nuclease pair POT32_T02 within a POT32 allele
gcaagcttgtgcaatagtagtagtacatctctcaaaactccttttacttcttcctccacttctttaacttccactcctaagccctctcaacttttcatccatggaaaacgtaaccaaatgttcaaagtttcatgcaaggttaccaataataacggtgaccaaaaccaaaacgttgaaacgaattctgttgatcgaagaaatgttcttcttggcttaggtggtctttatggtgttgctaatgctataccattagctgcatccgctgctccagctccacctcctgatctctcgtcttgtagtatagccaggattaacgaaaatcaggtggtgccgtacagttgttgcgcgcctaagcctgatcgtcagcctgctcatgaagctaatgaggagtatattgccgagtacaatctggcgattagtcgaatgaaagatcttgataagacacaacctttaaaccctattgg

SEQ ID NO: 344 - DNA, 514 bp, Artificial
  Mutation introduced by TALE nuclease pair POT32_T02 within a POT32 allele
gcaagcttgtgcaatagttgtagtacatctctcaaaactccttttacttcttcctccacttctttaacttccactcctaaaccctctcaacttttcatccatggaaaacgtaaccaaatgttcaaagtttcatgcaaggttaccaataataacggtgaccaaaaccaaaacgttgaaacgaattctgttgatcgaagaaatgttcttcttggcttaggtggtctttatggtgttgctaatgctataccattagctgcatccgctgctccagctccacctcctgatctctcgtcttgtagtatagccaggattaacgaaaatcaggtggtgccgtacagttgttgcgcgcctaagcctgatgatatggagaaagttccgtattacaagttcccttctatgactaagcttcgtcagcctgctcatgaagctaatgaggagtatattgccaagtacaatctggcgattagtcgaatgaaagatcttgataagacacaacctttaaaccctattggtt

SEQ ID NO: 345 - DNA, 511 bp, Artificial
  Mutation introduced by TALE nuclease pair POT32_T02 within a POT32 allele
gcaagcttgtgcaatagtagtagtacatcctctcaaaactccttttacttcttcctccacttctttacttccactcctaaaccctctcaacttttcatccatggaaaacgtaaccaaatgttcaaagtttcatgcatggttaccaataataacggtgaccaaaaccaaaacgttgaaacgaattctgttgatcgaagaaatgttcttcttggcttaggtggtctttatggtgttgctaatgctataccattagctgcatccgctgctccagctccacctcctgatctctcgtcttgtagtatagccaggattaacgaaaatcaggtggtgccgtacagttgttgcgcgcctaagcctgatgatatggagaaagttccgtattacaagttcccttctatgactaagctccagcctgctcatgaagctaatgaggagtatattgccaagtacaatctggcgattagtcgaatgaaagatcttgataagacacaacctttaaaccctattggtt

SEQ ID NO: 346 - DNA, 485 bp, Artificial
  Mutation introduced by TALE nuclease pair POT32_T02 within a POT32 allele
gcaagcttgtgcaatagtagtagtacatctctcaaaactccttttacttcttcctccacttctttatcttccactcctaagcccctctcaacttttcatccatggaaaacgtaaccaaatgttcaaagtttcatgcaaggttatcaataataacggtgaccaaaacgttgaaacgaattctgttgatcgaagaaatgttcttcttggcttaggtggtctttatggtgttgctaatgctataccattagctgcatccgctgctccaactccacctcctgatctctcgtcttgtagtatagccaggattaacgaaaatcaggtggtgccgtacagttgttgcgcgcctaagcctgatgatatggagaaagttccgtattacaagttcccttctatgactaagctccgtaatgaggagtatattgccaagtacaatctggcgattagtcgaatgagagatcttgataagacacaacctttaaacccta

SEQ ID NO: 347 - DNA, 505 bp, Artificial
  Mutation introduced by TALE nuclease pair POT32_T02 within a POT32 allele
gcaagcttgtgcaatagtagtagtacatctctcaaaactccttttacttcttcctccacttctttaacttccactcctaagcccctctcaacttttcatccatggaaaacgtaaccaaatgttcaaagtttcatgcaaggttaccaataataacggtgaccaaaaccaaaacgttgaaacgaattctgttgatcgaagaaatgttcttcttggcttaggtggtctttatggtgttgctaatgctataccattagctgcatccgctgctccagctccacctcctgatctctcgtcttgtagtatagccaggattaacgaaaatcaggtggtgccgtacagttgttgcgcgcctaagcctgatgatatggagaaagttccgtattacaagttcccttctatgactaagctctcgtcagcctgctcatgaagctaatgaggagtatattgccaagtacaatctggcgattagcagaatgaaggatcttgataagacacaacctttaaa

SEQ ID NO: 348 - DNA, 515 bp, Artificial
  Mutation introduced by TALE nuclease pair POT32_T02 within a POT32 allele
gcaagcttgtgcaatagtagtagtacatctctcaaaactccttttacttcttcctccacttctttatcttccactcctaagcccctctcaacttttcatccatggaaaacgtaaccaaatgttcaaagtttcatgcaaggttaccaataataacggtgaccaaaaccaaaacgttgaaacgaattctgttgatcgaagaaatgttcttcttggcttaggtggtctttatggtgttgctaatgctataccattagctgcatccgctgctccagctccacctcctgatctctcgtcttgtagtatagccaggattaacgaaaatcaggtggtgccgtacagttgttgcgcgcctaagcctgatgatatggagaaagttccgtattacaagttcccttctatgactaagctccgtcagcctgctcatgaagctaatgaggagtatattgccaagtacaatctggcgattagtcgaatgaaagatcttgataagacacaacctttaaaccctattggtt

SEQ ID NO: 349 - DNA, 496 bp, Artificial
  Mutation introduced by TALE nuclease pair POT32_T02 within a POT32 allele
gcaagcttgtgcaatagttgtagtacatctctcaaaactccttttacttcttcctccacttctttaacttccactcctaaaccctctcaacttttcatccatggaaaacgtaaccaaatgttcaaagtttcatgcaaggttaccaataataacggtgaccaaaaccaaaacgttgaaacgaattctgttgatcgaagaaatgttcttcttggcttaggtggtctttatggtgttgctaatgctataccattagctgcatccgctactccatctccacctcctgatctctcgtcttgtagtatagccaggattaacgaaactcatgtggtgccgtacagttgttgcgcgcctaagcctgatgatatggagaaagttccgtattacaagttcccttctatgactaagctccgtagcctgctcatgaagctaatgaggagtatattgccaagtacaatttggcggttagcaagatgagggatcttgataagacacaacc

SEQ ID NO: 350 - DNA, 410 bp, Artificial
  Mutation introduced by TALE nuclease pair POT32_T02 within a POT32 allele
gcaagcttgtgcaatagtagtagtacatctctcaaaactccttttacttcttcctccacttctttaacttccactcctaagccctctcaacttttcatccatggaaaacgtaaccaaatgttcaaagtttcatgcaaggttaccaataataacggtgaccaaaaccaaaacgttgaaacgaattctgttgatcgaagaaatgttcttcttggcttaggtggtctttatggtgttgctaatgctataccattagctgcatccgctgctccagctccacctcctgatctctcgtcttgtagtatagccaggattaacgaaaatcaggtggtgccgtacagttgttgcgcgcctaagtacaatctggcgattagtcgaatgaaagatcttgataagacacaacctttaaaccc

SEQ ID NO: 351 - DNA, 507 bp, Artificial
  Mutation introduced by TALE nuclease pair POT32_T02 within a POT32 allele
  misc_feature (152); (155): n is a or c or t or g
gcaagcttgtgcaatagtagtagtacatctctcaaaactccttttacttcttcctccacttctttaacttccactcctaagcccctctcaacttttcatccatggaaaacgtaaccaaatgttcaaagtttcatgcagttgctatcaataanagngcgaaccaaaacagttgaaacgaattctgttgatcgaagaaatgttcttcttggcttaggtggtctttatggtgttgctaatgctataccattagctgcatccgctactccatctccacctcctgatctctcgtcttgtagtatagccaggattaacgaaactcatgtggtgccgtacagttgttgcgcgcctaagcctgatgatatggagaaagttccgtattacaagttcccttctatgactaagctccgcctgctcatgaagctaatgaggagtatattgccaagtacaatctggcgattagtcgaatgaaagatcttgataagacacaacctttaaaccctattggtt

SEQ ID NO: 352 - DNA, 515 bp, Artificial
  Mutation introduced by TALE nuclease pair POT32_T02 within a POT32 allele
gcaagcttgtgcaatagtagtagtacatctctcaaaactccttttacttcttcctccacttctttaacttccactcctaagcccctctcaacttttcatccatggaaaacgtaaccaaatgttcaaagtttcatgcaaggttaccaataataacggtgaccaaaaccaaaacgttgaaacgaattctgttgatcgaagaaatgttcttcttggcttaggtggtctttatggtgttgctaatgctataccattagctgcatccgctgctccagctccacctcctgatctctcgtcttgtagtatagccaggattaacgaaaatcaggtggtgccgtacagttgttgcgcgcctaagcctgatgatatggagaaagttccgtattacaagttcccttctatgactaagctcgtctgctcctgctatgaagctaatgaggagtatattgccaagtacaatctggcgattagtcgaatgaagagtcttgataagacacaacctttaaaccctattggtt

SEQ ID NO: 353 - DNA, 422 bp, Artificial
  Mutation introduced by TALE nuclease pair POT32_T02 within a POT32 allele
gcaagcttgtgcaatagttgtagtacatctctcaaaactccttttacttcttcctccacttctttaacttccactcctaaaccctctcaacttttcatccatggaaaacgtaaccaaatgttcaaagtttcatgcaaggttaccaataataacggtgaccaaaaccaaaacgttgaaacgaattctgttgatcgaagaaatgttcttcttggcttaggtggtctttatggtgttgctaatgctataccattagctgcatccgctactccatctccacctcctgatctctcgtcttgtagtatagccaggattaacgaaactcatgtggtgccgtacagttgttgcgcgccattgccaagtacaattttggcggttagcaagatgagggatcttgataagacacaacctttaaaccctattgg

SEQ ID NO: 354 - DNA, 510 bp, Artificial
  Mutation introduced by TALE nuclease pair POT32_T02 within a POT32 allele
gcaagcttgttcaatagtagtagtacatctctcaaaactccttttacttcttcctccacttctttaacttccactcctaagccctctcaacttttcatccatggaaaacgtaaccaaatgttcaaagtttcatgcaaggttaccaataataacggtgaccaaaaccaaaacgttgaaacgaattctgttgatcgaagaaatgttcttcttggcttaggtggtctttatggtgttgctaatgctataccattagctgcatccgctgctccagctccacctcctgatctctcgtcttgtagtatagccaggattaacgaaaatcaggtggtgccgtacagttgttgcgcgcctaagcctgatgatatggagaaagttccgtattacaagttcccttctatgactaagctcagcctgctcatgaagctaatgaggagtatattgccaagtacaatttggcggttagcaagatgagggatcttgataagacacaacctttaaaccctattggtt

SEQ ID NO: 355 - DNA, 504 bp, Artificial
  Mutation introduced by TALE nuclease pair POT32_T02 within a POT32 allele
gcaagcttgtgcaatagtagtagtacatctctcaaaactccttttacttcttcctccacttctttatcttccactcctaagccctctcaacttttcatccatggaaaacgtaaccaaatgttcaaagtttcatgcaaggttaccaataataacggtgaccaaaaccaaaacgttgaaacgaattctgttgatcgaagaaatgttcttcttggcttaggtggtctttatggtgttgctaatgctataccattagctgcatccgctactccatctccacctcctgatctctcgtcttgtagtatagccaggattaacgaaactcatgtggtgccgtacagttgttgcgcgcctaagcctgatgatatggagaaagttccgtattacaagttcccttctatgactaagctccgtttgctcatgaagctaatgaggagtatattgccaagtacaatctggcgattagtcgaatgaaagatcttgataagacacaacctttaaacccta

SEQ ID NO: 356 - DNA, 495 bp, Artificial
  Mutation introduced by TALE nuclease pair POT32_T02 within a POT32 allele
gcaagcttgtgcaatagtagtagtacatctctcaaaactccttttacttcttcctccacttctttatcttccactcctaagcccctctcaacttttcatccatggaaaacgtaaccaaatgttcaaagtttcatgcaaggttatcaataataacggtgccaaaacgttgaaacgaattctgttgatcgaagaaatgttcttcttggcttaggtggtctttatggtgttgctaatgctataccattagctgcatccgctgctccaactccacctcctgatctctcgtcttgtagtatagccaggattaacgaaaatcaggtggtgccgtacagttgttgcgcgcctaagcctgatgatatggagaaagttccgtattacaagttcccttctatgactaagctccgttcagcctgctcatgaagctaatgaggagtatattgccaagtacaatctggcgattagtcgaatgagagatcttgataagacacaaccttt

SEQ ID NO: 357 - DNA, 509 bp, Artificial
  Mutation introduced by TALE nuclease pair POT32_T02 within a POT32 allele
gcaagcttgtgcaatagtagtagtacatctctcaaaactccttttacttcttcctccacttctttatcttccactcctaagcccctctcaacttttcatccatggaaaacgtaaccaaatgttcaaagtttcatgcaaggttatcaataataacggtgaccaaaacgttgaaacgaattctgttgatcgaagaaatgttcttcttggcttaggtggtctttatggtgttgctaatgctataccattagctgcatccgctgctccaactccacctcctgatctctcgtcttgtagtatagccaggattaacgaaaatcaggtggtgccgtacagttgttgcgcgcctaagcctgatgatatggagaaagttccgtattacaagttcccttctatgactaagctcctcagcctgctcatgaagctaatgaggagtatattgccaagtacaatttggcggttagcaagatgaggggatcttgataagacacaacctttaaaccctattggtt

SEQ ID NO: 358 - DNA, 513 bp, Artificial
  Mutation introduced by TALE nuclease pair POT32_T02 within a POT32 allele
gcaagcttgtgcaatagtagtagtacatctctcaaaactccttttacttcttcctccacttctttatcttccactcctaagccctctcaacttttcatccatggaaaacgtaaccaaaatgttcaaagtttcatgcaaggttaccaataataacggtgaccaaaaccaaaacgttgaaacgaattctgttgatcgaagaaatgttcttcttggcttaggtggtttttatggtgttgctaatgctataccattagctgcatccgctactccatctccacctcctgatctctcgtcttgtagtatagccaggattaacgaaactcatgtggtgccgtacagttgttgcgcgcctaagcctgatgatatggagaaagttccgtattacaagttcccttctatgactaagctccagcctgctcatgaagctaatgaggagtatattgccaagtacaatttggcggttagcaagatgaggggatcttgataagacacaacctttaaaccctattggtt

SEQ ID NO: 359 - DNA, 514 bp, Artificial
  Mutation introduced by TALE nuclease pair POT32_T02 within a POT32 allele
gcaagcttgtgcaatagttgtagtacatccctcaaaactccttttacttcttcctccacttctttaacttccactcctaaaccctctcaacttttcatccatggaaaacgtaaccaaatgttcaaagtttcatgcatggttaccaataataacggtgaccaaaaccaaaacgttgaaacgaattctgttgatcgaagaaatgttcttcttggcttaggtggtctttatggtgttgctaatgctataccattagctgcatccgctactccatctccacctcctgatctctcgtcttgtagtatagccaggattaacgaaactcatgtggtgccgtacagttgttgcgcgcctaagcctgatgatatggagaaagttccgtattacaagttcccttctatgactaagctccgtgtgctcctcatgaagctaatgaggagtatattgccaagtacaatttggcggttagcaagatgaggggatcttgataagacacaacctttaaaccctattggtt

SEQ ID NO: 360 - DNA, 521 bp, Artificial
  Mutation introduced by TALE nuclease pair POT32_T02 within a POT32 allele
gcaagcttgtgcaatagttgtagtacatctctcaaaactccttttacttcttcctccacttctttaacttccactcctaaaccctctcaacttttcatccatggaaaacgtaaccaaatgttcaaagtttcattgcaaggttaccaatgtaatcaacaggtgaaccgaaaatcccaaaacagttgaaacgaattctgttgatcgaagaaatgttcttcttggcttaggtggtctttatggtgttgctaatgctataccattagctgcatccgctactccatctccacctcctgatctctcgtcttgtagtatagccaggattaacgaaactcatgtggtgccgtacagttgttgcgcgcctaagcctgatgatatggagaaagttccgtattacaagttcccttctatgactaagcgtcagcctgctcatgaagctaatgaggagtatattgccaagtacaatttggcggttagcaagatgagggatcttgataagacacaacctttaaaccctattggtt

SEQ ID NO: 361 - DNA, 509 bp, Artificial
  Mutation introduced by TALE nuclease pair POT32_T02 within a POT32 allele
gcaagcttgtgcaatagtagtagtacatctctcaaaactccttttacttcttcctccacttctttatcttccactcctaagccctctcaacttttcatccatggaaaacgtaaccaaatgttcaaagtttcatgcaaggttatcaataataacggtgaccaaaacgttgaaacgaattctgttgatcgaagaaatgttcttcttggcttaggtggtctttatggtgttgctaatgctataccattagctgcatccgctgctccaactccacctcctgatctctcgtcttgtagtatagccaggattaacgaaaatcaggtggtgccgtacagttgttgcgcgcctaagcctgatgatatggagaaagttccgtattacaagttcccttctatgactaagctccggtcagcctgctcatgaagctaatgaggagtatattgccaagtacaatctggcgattagtcgaatgagagatcttgataagacacaacctttaaaccctattggtt

SEQ ID NO: 362 - DNA, 511 bp, Artificial
  Mutation introduced by TALE nuclease pair POT32_T02 within a POT32 allele
gcaagcttgtgcaatagtagtagtacatctctcaaaactccttttacttcttcctccacttctttatcttccactcctaagccctctcaacttttcatccatggaaaacgtaaccaaatgttcaaagtttcatgcaaggttaccaataataacggtgaccaaaaccaaaacgttgaaacaaattctgttgatcgaagaaatgttcttcttggcttaggtggtctttatggtgttgctaatgctataccattagctgcatccgctgctccagctccacctcctgatctctcgtcttgtagtatagccaggattaacgaaaatcaggtggtgccgtacagttgttgcgcgcctaagcctgatgatatggagaaagttccgtattacaagttcccttctatgactaagctccggcctgctcatgaagctaatgaggagtatattgccaagtacaatttggcggttagcaagatgagggatcttgataagacacaacctttaaaccctattggtt

SEQ ID NO: 363 - DNA, 514 bp, Artificial
  Mutation introduced by TALE nuclease pair POT32_T02 within a POT32 allele
gcaagcttgtgcaatagttgtagtacatctctcaaaactccttttacttcttcctccacttctttaacttccactcctaaaccctctcaacttttcatccatggaaaacgtaaccaaatgttcaaagtttcatgcaaggttaccaataataacggtgaccaaaaccaaaacgttgaaacgaattctgttgatcgaagaaatgttcttcttggcttaggtggtctttatggtgttgctaatgctataccattagctgcatccgctactccatctccacctcctgatctctcgtcttgtagtatagccaggattaacgaaactcatgtggtgccgtacagttgttgcgcgcctaagcctgatgatatggagaaagttccgtattacaagttcccttctatgactaagctcgtcagcctgctcatgaagctaatgaggagtatattgccaagtacaatttggcggttagcaagatgaggggatcttgataagacacaacctttaaaccctattggtt

SEQ ID NO: 364 - DNA, 513 bp, Artificial
  Mutation introduced by TALE nuclease pair POT32_T02 within a POT32 allele
gcaagcttgtgcaatagtagtagtacatctctcaaaactccttttacttcttcctccacttctttatcttccactcctaagccctctcaacttttcatccatggaaaacgtaaccaaatgttcaaagtttcatgcaaggttaccaataataacggtgaccaaaaccaaaacgttgaaacaaattctgttgatcgaagaaatgttcttcttggcttaggtggtctttatggtgttgctaatgctataccattagctgcatccgctgctccagctccacctcctgatctctcgtcttgtagtatagccaggattaacgaaaatcaggtggtgccgtacagttgttgcgcgcctaagcctgatgatatggagaaagttccgtattacaagttcccttctatgactaagctcgtcagcctgctcatgaagctaatgaggagtatattgccaagtacaatctggcgattagtcgaatgaaagatcttgataagacacaacctttaaaccctattggtt

SEQ ID NO: 365 - DNA, 468 bp, Artificial
  Mutation introduced by TALE nuclease pair POT32_T02 within a POT32 allele
gcaagcttgtgcaatagtagtagtacatctctcaaaactccttttacttcttcctccacttctttaacttccactcctaagccctctcaacttttcatccatggaaaacgtaaccaaatgttcaaagtttcatgcaaggttaccaataataacggtgaccaaaaccaaaacgttgaaacgaattctgttgatcgaagaaatgttcttcttggcttaggtggtctttatggtgttgctaatgctataccattagctgcatccgctgctccagctccacctcctgatctctcgtcttgtagtatagccaaggattaacgaaaatcaggtggtgccgtacagttgttgcgcgcctaagcctgatgatatggagaaagttccgtattatcaagttcccttctatgactaatgctccgtgttgccaagtacaatttggcggttagcaagatgagggatcttgataagacacaa

SEQ ID NO: 366 - DNA, 514 bp, Artificial
  Mutation introduced by TALE nuclease pair POT32_T02 within a POT32 allele
gcaagcttgtgcaatagtagtagtacatctctcaaaactccttttacttcttcctccacttctttaacttccactcctaagccctctcaacttttcatccatggaaaacgtaaccaaatgttcaaagtttcatgcaaggttaccaataataacggtgaccaaaaccaaaacgttgaaacaaattctgttgatcgaagaaatgttcttcttggcttaggtggtctttatggtgttgctaatgctataccattagctgcatccgctgctccagctccacctcctgatctctcgtcttgtagtatagccaggattaacgaaaatcaggtggtgccgtacagttgttgcgcgcctaagcctgatgatatggagaaagttccgtattacaagttcccttctatgactaagctccgtcagcctgctcatgaagctaatgaggagtatattgccaagtacaatctggcgattagtcgaatgaaagatcttgataagacacaacctttaaaccctattggtt

SEQ ID NO: 367 - DNA, 497 bp, Artificial
  Mutation introduced by TALE nuclease pair POT32_T02 within a POT32 allele
gcaagcttgtgcaatagtagtagtacatctctcaaaactccttttacttcttcctccacttctttatcttccactcctaagccctctcaacttttcatccatggaaaacgtaaccaaatgttcaaagtttcatgcaaggttaccaataataacggtgaccaaaaccaaaacgttgaaacgaattctgttgatcgaagaaatgttcttcttggcttaggtggtctttatggtgttgctaatgctataccattagctgcatccgctactccatctccacctcctgatctctcgtcttgtagtatagccaggattaacgaaaactcatgtggtgccgtacagttgttgcgcgcctaagcctgatgatatggagaaagttccgtattacaagttcccttctatgactaagctccgtttgctcatgaagctaatgaggagtatattgccaagtacaatctggcgattagtcgaatgaaagatcttgataagacacaaccttt

SEQ ID NO: 368 - DNA, 502 bp, Artificial
  Mutation introduced by TALE nuclease pair POT32_T02 within a POT32 allele
gcaagcttgtgcaatagttgtagtacatctctcaaaactccttttacttcttcctccacttctttaacttccactcctaaaccctctcaacttttcatccatggaaaacgtaaccaaatgttcaaagtttcatgcaaggttaccaataataacggtgaccaaaaccaaaacgttgaaacgaattctgttgatcgaagaaatgttcttcttggcttaggtggtctttatggtgttgctaatgctataccattagctgcatccgctactccatctctacctcctgatctctcgtcttgtagtatagccaggattaacgaaactcatgtggtgccgtacagttgttgcgcgcctaagcctgatgatatggagaaagttccgtattacaagttcccttctatgactaagctccgtgctcatgaagctaatgaggagtatattgccaagtacaatttggcggttagcaagatgagggatcttgataagacacaacctttaaacccta

SEQ ID NO: 369 - DNA, 514 bp, Artificial
  Mutation introduced by TALE nuclease pair POT32_T02 within a POT32 allele
gcaagcttgtgcaatagtagtagtacatccctcaaaactccttttacttcttcctccacttctttaacttccactcctaaaccctctcaacttttcatccatggaaaacgtaaccaaatgttcaaagtttcatgcatggttaccaataataacggtgaccaaaaccaaaacgttgaaacgaattctgttgatcgaagaaatgttcttcttggcttaggtggtctttatggtgttgctaatgctataccattagctgcatccgctactccatctccacctcctgatctctcgtcttgtagtatagccaggattaacgaaactcatgtggtgccgtacagttgttgcgcgcctaagcctgatgatatggagaaagttccgtattacaagttcccttctatgactaagctccgtcagcctgctcatgaagctaatgaggagtatattgccaagtacaatctggcgattagtcgaatgaaagatcttgataagacacaacctttaaaccctattggtt

SEQ ID NO: 370 - DNA, 513 bp, Artificial
  Mutation introduced by TALE nuclease pair POT32_T02 within a POT32 allele
gcaagcttgtgcaatagttgtagtacatctctcaaaactccttttacttcttcctccacttctttaacttccactcctaaaccctctcaacttttcatccatggaaaacgtaaccaaatgttcaaagtttcatgcaaggttaccaataataacggtgaccaaaaccaaaacgttgaaacgaattctgttgatcgaagaaatgttcttcttggcttaggtggtctttatggtgttgctaatgctataccattagctgcatccgctactccatctccacctcctgatctctcgtcttgtagtatagccaggattaacgaaactcatgtggtgccgtacagttgttgcgcgcctaagcctgatgatatggagaaagttccgtattacaagttcccttctatgactaagctcgtcagcctgctcatgaagctaatgaggagtatattgccaagtacaatttggcggttagcaagatgagggatcttgataagacacaacctttaaaccctattggtt

SEQ ID NO: 371 - DNA, 474 bp, Artificial
  Mutation introduced by TALE nuclease pair POT32_T02 within a POT32 allele
gcaagcttgtgcaatagttgtagtacatccctcaaaactccttttacttcttcctccacttctttaacttccactcctaaaccctctcaacttttcatccatggaaaacgtaaccaaatgttcaaagtttcatgcatggttaccaataataacggtgaccaaaaccaaaacgttgaaacgaattctgttgatcgaagaaatgttcttcttggcttaggtggtctttatggtgttgctaatgctataccattagctgcatccgctactccatctccacctcctgatctctcgtcttgtagtatagccaggattaacgaaactcatgtggtgccgtacagttgttgcgcgcctaagcctgatgatatggagaaagttccgtattacaagttcccttctatgactaagctccgtgtgctgctcatgaagctaatgaggagtatattgccaagtacaatttggcggttagcaagatga

SEQ ID NO: 372 - DNA, 458 bp, Artificial
  Mutation introduced by TALE nuclease pair POT32_T02 within a POT32 allele
gcaagcttgtgcaatagttgtagtacatccctcaaaactccttttacttcttcctccacttctttaacttccactcctaaaccctctcaacttttcatccatggaaaacgtaaccaaatgttcaaagtttcatgcatggttaccaataataacggtgaccaaaaccaaaacgttgaaacgaattctgttgatcgaagaaatgttcttcttggcttaggtggtctttatggtgttgctaatgctataccattagctgcatccgctactccatctccacctcctgatctctcgtcttgtagtatagccaggattaacgaaactcatgtggtgccgtacagttgttgcgcgcctaagcctgatgatatggagaaagttccgtattacaagttcccttctatgactaagctccatgaagctaatgaggagtatattgccaagtacaatttggcggttagcaa

SEQ ID NO: 373 - DNA, 489 bp, Artificial
  Mutation introduced by TALE nuclease pair POT32_T02 within a POT32 allele
gcaagcttgtgcaatagttgtagtacatccctcaaaactccttttacttcttcctccacttctttaacttccactcctaaaccctctcaacttttcatccatggaaaacgtaaccaaatgttcaaagtttcatgcatggttaccaataataacggtgaccaaaaccaaaacgttgaaacgaattctgttgatcgaagaaatgttcttcttggcttaggtggtctttatggtgttgctaatgctataccattagctgcatccgctactccatctccacctcctgatctctcgtcttgtagtatagccaggattaacgaaactcatgtggtgccgtacagttgttgcgcgcctaagcctgatgatatggagaaagttccgtattacaagttcccttctatgactaagctccgtgctcatgaagctaatgaggagtatattgccaagtacaatctggcgattagtcgaatgaaagatcttgataagacacaa

SEQ ID NO: 374 - DNA, 487 bp, Artificial
  Mutation introduced by TALE nuclease pair POT32_T02 within a POT32 allele
gcaagcttgtgcaatagttgtagtacatccctcaaaactccttttacttcttcctccacttctttaacttccactcctaaacccctctcaacttttcatccatggaaaacgtaaccaaatgttcaaagtttcatgcatggttaccaataataacggtgaccaaaaccaaaacgttgaaacgaattctgttgatcgaagaaatgttcttcttggcttaggtggtctttatggtgttgctaatgctataccattagctgcatccgctactccatctccacctcctgatctctcgtcttgtagtatagccaggattaacgaaactcatgtggtgccgtacagttgttgcgcgcctaagcctgatgatatggagaaagttccgtattacaagttcccttctatgactaagctccgtgttatattgccaagtacaatctggcgattagtcgaatgagagatctgataagacacaacctttaaaccctattgg

SEQ ID NO: 375 - DNA, 482 bp, Artificial
  Mutation introduced by TALE nuclease pair POT32_T02 within a POT32 allele
gcaagcttgtgcaatagtagtagtacatctctcaaaactccttttacttcttcctccacttctttatcttccactcctaagccctctcaacttttcatccatggaaaacgtaaccaaatgttcaaagtttcatgcaaggttaccaataataacggtgaccaaaaccaaaacgttgaaacaaattctgttgatcgaagaaatgttcttcttggcttaggtggtctttatggtgttgctaatgctataccattagctgcatccgctgctccagctccacctcctgatctctcgtcttgtagtatagccaggattaacgaaaatcaggtggtgccgtacagttgttgcgcgcctaagcctgatgatatggagaaagttccgtattacaagttcccttctatgactaagctccgcctgctcatgaagctaatgaggagtatattgccaagtacaatttggcggttagcaagatgaggggatcttga

SEQ ID NO: 376 - DNA, 496 bp, Artificial
  Mutation introduced by TALE nuclease pair POT32_T02 within a POT32 allele
gcaagcttgtgcaatagtagtagtacatctctcaaaactccttttacttcttcctccacttctttatcttccactcctaagcccctctcaacttttcatccatggaaaacgtaaccaaatgttcaaagtttcatgcaaggttatcaataataacggtgaccaaaacgttgaaacgaattctgttgatcgaagaaatgttcttcttggcttaggtggtctttatggtgttgctaatgctataccattagctgcatccgctgctccaactccacctcctgatctctcgtcttgtagtatagccaggattaacgaaaatcaggtggtgccgtacagttgttgcgcgcctaagcctgatgatatggagaaagttccgtattacaagttcccttctatgactaagctccgttcagcctgctcatgaagctaatgaggagtatattgccaagtacaatctggcgattagtcgaatgagagatcttgataagacacaaccttt

SEQ ID NO: 377 - DNA, 457 bp, Artificial
  Mutation introduced by TALE nuclease pair POT32_T02 within a POT32 allele
gcaagcttgtgcaatagtagtagtacatctctcaaaactccttttacttcttcctccacttctttatcttccactcctaagcccctctcaacttttcatccatggaaaacgtaaccaaatgttcaaagtttcatgcaaggttatcaataataacggtgaccaaaacgttgaaacgaattctgttgatcgaagaaatgttcttcttggcttaggtggtctttatggtgttgctaatgctataccattagctgcatccgctgctccaactccacctcctgatctctcgtcttgtagtatagccaggattaacgaaaatcaggtggtgccgtacagttgttgcgcgcctaagcctgatgatatgctcatgaagctaatgaggagtatattgccaagtacaatctggcgattagtcgaatgagagatcttgataagacacaacctttaaaccctattggtt

SEQ ID NO: 378 - DNA, 477 bp, Artificial
  Mutation introduced by TALE nuclease pair POT32_T02 within a POT32 allele
gcaagcttgtgcaatagtagtagtacatctctcaaaactccttttacttcttcctccacttctttatcttccactcctaagcccctctcaacttttcatccatggaaaacgtaaccaaatgttcaaagtttcatgcaaggttaccaataataacggtgaccaaaaccaaaacgttgaaacaaaattctgttgatcgaagaaatgttcttcttggcttaggtggtctttatggtgttgctaatgctataccattagctgcatccgctgctccagctccacctcctgatctctcgtcttgtagtatagccaggattaacgaaaatcaggtggtgccgtacagttgttgcgcgcctaagcctgatgatatggagaaagttccgtattacaagttcccttctatgactaagaagctaatgaggagtatattgccaagtacaatctggcgattagtcgaaatgaaagatcttgataagacac

SEQ ID NO: 379 - DNA, 474 bp, Artificial
  Mutation introduced by TALE nuclease pair POT32_T02 within a POT32 allele
gcaagcttgtgcaatagttgtagtacatctctcaaaactccttttacttcttcctccacttctttaacttccactcctaaaccctctcaacttttcatccatggaaaacgtaaccaaatgttcaaagtttcatgcaaggttaccaataataacggtgaccaaaaccaaaacgttgaaacgaattctgttgatcgaagaaatgttcttcttggcttaggtggtctttatggtgttgctaatgctataccattagctgcatccgctactccatctccacctcctgatctctcgtcttgtagtatagccaggattaacgaaactcatgtggtgccgtacagttgttgcgcgcctaagcctgatgatatggagaaagttccgtattacaagttcccttctatgactaagctccgtagcctgctcatgaagctaatgaggagtatattgccaagtacaatttggcggttagcaagatga

SEQ ID NO: 380 - DNA, 476 bp, Artificial
  Mutation introduced by TALE nuclease pair POT32_T02 within a POT32 allele
gcaagcttgtgcaatagtagtagtacatctctcaaaactccttttacttcttcctccacttctttaacttccactcctaagccctctcaacttttcatccatggaaaacgtaaccaaatgttcaaagtttcatgcaaggttaccaataataacggtgaccaaaaccaaaacgttgaaacgaattctgttgatcgaagaaatgttcttcttggcttaggtggtctttatggtgttgctaatgctataccattagctgcatccgctgctccagctccacctcctgatctctcgtcttgtagtatagccaggatttaacgaaaatcaggtggtgccgtacagttgttgcgcgcctaagcctgatgatatggagaaagttccgtattacaagttcccttctatgactaagctccgtcagcctgctcatgaagctaatgaggagtatattgccaagtacaatttggcggttagcaagatga

SEQ ID NO: 381 - DNA, 515 bp, Artificial
  Mutation introduced by TALE nuclease pair POT32_T02 within a POT32 allele
gcaagcttgtgcaatagttgtagtacatccctcaaaactccttttacttcttcctccacttctttatcttccactcctaagccctctcaacttttcatccatggaaaacgtaaccaaatgttcaaagtttcatgcaaggttaccaataataacggtgaccaaaaccaaaacgttgaaacaaattctgttgatcgaagaaatgttcttcttggcttaggtggtctttatggtgttgctaatgctataccattagctgcatccgctgctccagctccacctcctgatctctcgtcttgtagtatagccaggattaacgaaaatcaggtggtgccgtacagttgttgcgcgcctaagcctgatgatatggagaaagttccgtattacaagttcccttctatgactaagctcgtctgctgcctgctatgaagctaatgaggagtatattgccaagtacaatctggcgattagtcgaatgaaagatcttgataagacacaacctttaaaccctattggtt

SEQ ID NO: 382 - DNA, 503 bp, Artificial
  Mutation introduced by TALE nuclease pair POT32_T02 within a POT32 allele
gcaagcttgtgcaatagtagtagtacatccctcaaaactccttttacttcttcctccacttctttaacttccactcctaaaccctctcaacttttcatccatggaaaacgtaaccaaatgttcaaagtttcatgcatggttaccaataataacggtgaccaaaaccaaaacgttgaaacgaattctgttgatcgaagaaatgttcttcttggcttaggtggtctttatggtgttgctaatgctataccattagctgcatccgctactccatctccacctcctgatctctcgtcttgtagtatagccaggattaacgaaactcatgtggtgccgtacagttgttgcgcgcctaagcctgatgatatggagaaagttccgtattacaagttcccttctttgttcgtcagcctgctcatgaagctaatgaggagtatattgccaagtacaattctggcggttagtcagaatgaaggatcttgataagacacaacctttaaacccta

SEQ ID NO: 383 - DNA, 514 bp, Artificial
  Mutation introduced by TALE nuclease pair POT32_T02 within a POT32 allele
gcaagcttgtgcaatagttgtagtacatctctcaaaactccttttacttcttcctccacttctttaacttccactcctaaaccctctcaacttttcatccatggaaaacgtaaccaaatgttcaaagtttcatgcaaggttaccaataataacggtgaccaaaaccaaaacgttgaaacgaattctgttgatcgaagaaatgttcttcttggcttaggtggtctttatggtgttgctaatgctataccattagctgcatccgctactccatctccacctcctgatctctcgtcttgtagtatagccaggattaacgaaactcatgtggtgccgtacagttgttgcgcgcctaagcctgatgatatggagaaagttccgtattacaagttcccttctatgactaagctccgtagcctgctcatgaagctaatgaggagtatattgccaagtacaatttggcggttagcaagatgaggggatcttgataagacacaacctttaaaccctattggtt

SEQ ID NO: 384 - DNA, 504 bp, Artificial
  Mutation introduced by TALE nuclease pair POT32_T02 within a POT32 allele
gcaagcttgtgcaatagtagtagtacatctctcaaaactccttttacttcttcctccacttctttatcttccactcctaagcccctctcaacttttcatccatggaaaacgtaaccaaatgttcaaagtttcatgcaaggttaccaataataacggtgaccaaaaccaaaacgttgaaacgaattctgttgatcgaagaaatgttcttcttggcttaggtggtctttatggtgttgctaatgctataccattagctgcatccgctactccatctccacctcctgatctctcgtcttgtagtatagccaggattaacgaaactcatgtggtgccgtacagttgttgcgcgcctaagcctgatgatatggagaaagttccgtattacaagttcccttctatgactatgtcagcctgctcatgaagctaatgaggagtatattgccaagtacaatctggcgattagtcgaatgaaagatcttgataagacacaacctttaaacccta

SEQ ID NO: 385 - DNA, 513 bp, Artificial
  Mutation introduced by TALE nuclease pair POT32_T02 within a POT32 allele
gcaagcttgtgcaatagtagtagtacatctctcaaaactccttttacttcttcctccacttctttaacttccactcctaaaccctctcaacttttcatccatggaaaacgtaaccaaatgttcaaagtttcatgcaaggttaccaataataacggtgaccaaaaccaaaacgttgaaacgaattctgttgatcgaagaaatgttcttcttggcttaggtggtctttatggtgttgctaatgctataccattagctgcatccgctactccatctccacctcctgatctctcgtcttgtagtatagccaggattaacgaaactcatgtggtgccgtacagttgttgcgcgcctaagcctgatgatatggagaaagttccgtattacaagttcccttctatgactaagctccgtcagcctgctcatgaagctaatgaggagtatattgccaagtacaatttggcggttagcaagatgagggatcttgataagacacaacctttaaaccctatggtt

SEQ ID NO: 386 - DNA, 481 bp, Artificial
  Mutation introduced by TALE nuclease pair POT32_T02 within a POT32 allele
gcaagcttgtgcaatagtagtagtacatctctcaaaactccttttacttcttcctccacttctttatcttccactcctaagcccctctcaacttttcatccatggaaaacgtaaccaaatgttcaaagtttcatgcaaggttaccaataataacggtgaccaaaaccaaaacgttgaaacgaattctgttgatcgaagaaatgttcttcttggcttaggtggtctttatggtgttgctaatgctataccattagctgcatccgctgctccagctccacctcctgatctctcgtcttgtagtatagccaggattaacgaaaatcaggtggtgccgtacagttgttgcgcgcctaagcctgatgatatggagaaagttccgtattacaagttcccttctatgactaagcttattgccaagtacaatttggcggttagcaagatgaggggatcttgataagacacaacctttaaaccctattgg

SEQ ID NO: 387 - DNA, 511 bp, Artificial
  Mutation introduced by TALE nuclease pair POT32_T02 within a POT32 allele
gcaagcttgtgcaatagtagtagtacatctctcaaaactccttttacttcttcctccacttctttacttccactcctaagccctctcaacttttcatccatggaaaacgtaaccaaatgttcaaagtttcatgcaaggttaccaataataacggtgaccaaaaccaaaacgttgaaacaaattctgttgatcgaagaaatgttcttcttggcttaggtggtctttatggtgttgctaatgctataccattagctgcatccgctgctccagctccacctcctgatctctcgtcttgtagtatagccaggattaacgaaaatcaggtggtgccgtacagttgttgcgcgcctaagcctgatgatatggagaaagttccgtattacaagttcccttctatgactaagctgtcagcctgctcatgaagctaatgaggagtatattgccaagtacaatctggcgattagtcgaatgaaagatcttgataagacacaacctttaaaccctattggtt

SEQ ID NO: 388 - DNA, 506 bp, Artificial
  Mutation introduced by TALE nuclease pair POT32_T02 within a POT32 allele
gcaagcttgtgcaatagtagtagtacatctctcaaaactccttttacttcttcctccacttctttatcttccactcctaagcccctctcaacttttcatccatggaaaacgtaaccaaatgttcaaagtttcatgcaaggttatcaataataacggtgaccaaaacgttgaaacgaattctgttgatcgaagaaatgttcttcttggcttaggtggtctttatggtgttgctaatgctataccattagctgcatccgctgctccaactccacctcctgatctctcgtcttgtagtatagccaggattaacgaaaatcaggtggtgccgtacagttgttgcgcgcctaagcctgatgatatggagaaagttccgtattacaagttcccttctatgactaagctccagcctgctcatgaagctaatgaggagtatattgccaagtacaatctggcgattagtcgaatgagagatcttgataagacacaacctttaaaccctattggtt

SEQ ID NO: 389 - DNA, 511 bp, Artificial
  Mutation introduced by TALE nuclease pair POT32_T02 within a POT32 allele
gcaagcttgttcaatagtagtagtacatctctcaaaactccttttacttcttcctccacttctttaacttccactcctaagccctctcaacttttcatccatggaaaacgtaaccaaatgttcaaagtttcatgcaaggttaccaataataacggtgaccaaaaccaaaacgttgaaacgaattctgttgatcgaagaaatgttcttcttggcttaggtggtctttatggtgttgctaatgctataccattagctgcatccgctgctccagctccacctcctgatctctcgtcttgtagtatagccaggattaacgaaaatcaggtggtgccgtacagttgttgcgcgcctaagcctgatgatatggagaaagttccgtattacaagttcccttctatgactaagctcagcctgctcatgaagctaatgaggagtatattgccaagtacaatttggcggttagcaagatgaggggatcttgataagacacaacctttaaaccctattggtt

SEQ ID NO: 390 - DNA, 515 bp, Artificial
  Mutation introduced by TALE nuclease pair POT32_T02 within a POT32 allele
gcaagcttgtgcaatagtagtagtacatctctcaaaactccttttacttcttcctccacttctttatcttccactcctaagcccctctcaacttttcatccatggaaaacgtaaccaaatgttcaaagtttcatgcaaggttaccaataataacggtgaccaaaaccaaaacgttgaaacaaattctgttgatcgaagaaatgttcttcttggcttaggtggtctttatggtgttgctaatgctataccattagctgcatccgctgctccagctccacctcctgatctctcgtcttgtagtatagccaggattaacgaaaatcaggtggtgccgtacagttgttgcgcgcctaagcctgatgatatggagaaagttccgtattacaagttcccttctatgactaagctccgtcagcctgctcatgaagctaatgaggagtatattgccaagtacaatctggcgattagtcgaatgaaagatcttgataagacacaacctttaaaccctattggtt

SEQ ID NO: 391 - DNA, 485 bp, Artificial
  Mutation introduced by TALE nuclease pair POT32_T02 within a POT32 allele
gcaagcttgtgcaatagtagtagtacatctctcaaaactccttttacttcttcctccacttctttatcttccactcctaagccctctcaacttttcatccatggaaaacgtaaccaaatgttcaaagtttcatgcaaggttaccaataataacggtgaccaaaaccaaaacgttgaaacaaattctgttgatcgaagaaatgttcttcttggcttaggtggtctttatggtgttgctaatgctataccattagctgcatccgctgctccagctccacctcctgatctctcgtcttgtagtatagccaggattaacgaaaatcaggtggtgccgtacagttgttgcgcgcctaagcctgatgatatggagaaagttccgtattacaagttcccttctatgactaagctccgcatgaagctaatgaggagtatattgccaagtacaatctggcgattagtcgaatgaaagatcttgataagacacaa

SEQ ID NO: 392 - DNA, 518 bp, Artificial
  Mutation introduced by TALE nuclease pair POT32_T02 within a POT32 allele
gcaagcttgtgcaatagttgtagtacatccctcaaaactccttttacttcttcctccacttctttaacttccactcctaaaccctctcaacttttcatccatggaaaacgtaaccaaatgttcaaagtttcatgcatggttaccaataataacggtgaccaaaaccaaaacgttgaaacgaattctgttgatcgaagaaatgttcttcttggcttaggtggtctttatggtgttgctaatgctataccattagctgcatccgctactccatctccacctcctgatctctcgtcttgtagtatagccaggattaacgaaactcatgtggtgccgtacagttgttgcgcgcctaagcctgatgatatggagaaagttccgtattacaagttcccttctatgactaagctccgtgacgtcagcctgctcatgaagctaatgaggagtatattgccaagtacaatctggcgattagtcgaatgaaagatcttgataagacacaacctttaaaccctatggtt

SEQ ID NO: 393 - DNA, 513 bp, Artificial
  Mutation introduced by TALE nuclease pair POT32_T02 within a POT32 allele
gcaagcttgtgcaatagtagtagtacatccctcaaaactccttttacttcttcctccacttctttaacttccactcctaaaccctctcaacttttcatccatggaaaacgtaaccaaatgttcaaagtttcatgcatggttaccaataataacggtgaccaaaaccaaaacgttgaaacgaattctgttgatcgaagaaatgttcttcttggcttaggtggtctttatggtgttgctaatgctataccattagctgcatccgctactccatctccacctcctgatctctcgtcttgtagtatagccaggattaacgaaactcatgtggtgccgtacagttgttgcgcgcctaagcctgatgatatggagaaagttccgtattacaagttcccttctatgactaagctccgcagcctgctcatgaagctaatgaggagtatattgccaagtacaatttggcggttagcaagatgagggatcttgataagacacaacctttaaaccctattggtt

SEQ ID NO: 394 - DNA, 497 bp, Artificial
  Mutation introduced by TALE nuclease pair POT32_T02 within a POT32 allele
gcaagcttgtgcaatagtagtagtacatctctcaaaactccttttacttcttcctccacttctttaacttccactcctaagccctctcaacttttcatccatggaaaacgtaaccaaatgttcaaagtttcatgcaaggttaccaataataacggtgaccaaaaccaaaacgttgaaacgaattctgttgatcgaagaaatgttcttcttggcttaggtggtctttatggtgttgctaatgctataccattagctgcatccgctgctccagctccacctcctgatctctcgtcttgtagtatagccaggattaacgaaaatcaggtggtgccgtacagttgttgcgcgcctaagcctgatgatatggagaaagttccgtattacaagttcccttctatgactaagctccgtctgctcctgcatgaagctaatgaggagtatattgccaagtacaatctggcgattagtcgaatgaaagatcttgataagacacaacc

SEQ ID NO: 395 - DNA, 503 bp, Artificial
  Mutation introduced by TALE nuclease pair POT32_T02 within a POT32 allele
gcaagcttgtgcaatagtagtagtacatctctcaaaactccttttacttcttcctccacttctttaacttccactcctaaccgcctctcaacttttcatccatggaaaacgtaaccaaatgttcaaagtttcatgcaaggttaccaataataacggtgaccaaaaccaaaacgttgaaacgaattctgttgatcgaagaaatgttcttcttggcttaggtggtctttatggtgttgctaatgctataccattagctgcatccgctactccatctccacctcctgatctctcgtcttgtagtatagccaggattaacgaaactcatgtggtgccgtacagttgttgcgcgcctaagcctgatgatatggagaaagttccgtattacaagttcccttctatgactaagctccgtgctcatgaagctaatgaggagtatattgccaagtacaatctggcgattagtcgaatgaaagatcttgataagacacaacctttaaacccta

SEQ ID NO: 396 - DNA, 500 bp, Artificial
  Mutation introduced by TALE nuclease pair POT32_T02 within a POT32 allele
  misc_feature (229); (333); (334): n is a or c or t or g
gcaagcttgtgcaatagtagtagtacatctctcaaaactccttttacttcttcctccacttctttaacttccactcctaagcccctctcaacttttcatccatggaaaacgtaaccaaatgttcaaagtttcatgcaaggttaccaataataacggtgaccaaaaccaaaacgttgaaacgaattctgttgatcgaagaaatgttcttcttggcttaggtggtctttanggtgttgctaatgctataccattagctgcatccgctgctccagctccacctcctgatctctcgtcttgtagtatagccaggattaacgaaaatcaggtggtgcnntcagttgttgcgcgcctaagcctgatgatatggagaaagttccgtattacaagttcccttctatgactaagctctgctcatgaagctaatgaggagtatattgccaagtacaatctggcgattagtcgaatgaaagatcttgataagacacaacctttaaacccta

SEQ ID NO: 397 - DNA, 462 bp, Artificial
  Mutation introduced by TALE nuclease pair POT32_T02 within a POT32 allele
gcaagcttgtgcaatagtagtagtacatctctcaaaactccttttacttcttcctccacttctttacttccactcctaaccgcctctcaacttttcatccatggaaaacgtaaccaaatgttcaaagtttcatgcaaggttaccaataataacggtgaccaaaaccaaaacgttgaaacaattctgttgatcgaagaaatgttcttcttggcttaggtggtctttatggtgttgctaatgctataccattagctgcatccgctgctccagctccacctcctgatctctcgtcttgtagtatagccaggattaacgaaaatcaggtggtgccgtacagttgttgcgcgcctaagcctgatgatatggagaaagttccgtattacaagttcccttctatgactaagctccgtcagcctgctcatgaagctaatgaggagtatattgccaagtacaattgcgttg

SEQ ID NO: 398 - DNA, 513 bp, Artificial
  Mutation introduced by TALE nuclease pair POT32_T02 within a POT32 allele
gcaagcttgtgcaatagtagtagtacatcctcaaaactccttttacttcttcctccacttctttaacttccactcctaagccctctcaacttttcatccatggaaaacgtaaccaaatgttcaaagtttcatgcaaggttaccaataataacggtgaccaaaaccaaaacgttgaaacgaattctgttgatcgaagaaatgttcttcttggcttaggtggtctttatggtgttgctaatgctataccattagctgcatccgctgctccagctccacctcctgatctctcgtcttgtagtatagccaggattaacgaaaatcaggtggtgccgtacagttgttgcgcgcctaagcctgatgatatggagaaagttccgtattacaagttcccttctatgactaagctccgtcagcctgctcatgaagctaatgaggagtatattgccaagtacaatctggcgattagtcgaatgaaagatcttgataagacacaacctttaaaccctattggtt

SEQ ID NO: 399 - DNA, 416 bp, Artificial
  Mutation introduced by TALE nuclease pair POT32_T02 within a POT32 allele
gcaagcttgtgcaatagtagtagtacatctctcaaaactccttttacttcttcctccacttctttaacttccactcctaagccctctcaacttttcatccatggaaaacgtaaccaaatgttcaaagtttcatgcaaggttaccaataataacggtgaccaaaaccaaaacgttgaaacgaattctgttgatcgaagaaatgttcttcttggcttaggtggtctttatggtgttgctaatgctataccattagctgcatccgctgctccagctccacctcctgatctctcgtcttgtagtatagccaggattaacgaaaatcaggtggtgccgtacagttgttgcgcgcctaagtacaatctggcgattagtcgaatgaaagatcttgataagacacaacctttaaaccctattgg

SEQ ID NO: 400 - DNA, 512 bp, Artificial
  Mutation introduced by TALE nuclease pair POT32_T02 within a POT32 allele
gcaagcttgtgcaatagtagtagtacatctctcaaaactccttttacttcttcctccacttctttaacttccactcctaaccctctcaacttttcatccatggaaaacgtaaccaaatgttcaaagtttcatgcaaggttaccaataataacggtgaccaaaaccaaaacgttgaaacgaattctgttgatcgaagaaatgttcttcttggcttaggtggtctttatggtgttgctaatgctataccattagctgcatccgctgctccagctccacctcctgatctctcgtcttgtagtatagccaggattaacgaaaatcaggtggtgccgtacagttgttgcgcgcctaagcctgatgatatggagaaagttccgtattacaagttcccttctatgactaagctcccagcctgctcatgaagctaatgaggagtatattgccaagtacaatttggcggttagcaagatgaggggatcttgataagacacaacctttaaaccctattggtt

SEQ ID NO: 401 - DNA, 507 bp, Artificial
  Mutation introduced by TALE nuclease pair POT32_T02 within a POT32 allele
gcaagcttgtgcaatagtagtagtacatctctcaaaactccttttacttcttcctccacttctttaacttccactcctaagcccctctcaacttttcatccatggaaaacgtaaccaaatgttcaaagtttcatgcaaggttatcaataataacggtgaccaaaacgttgaaacgaattctgttgatcgaagaaatgttcttcttggcttaggtggtctttatggtgttgctaatgctataccattagctgcatccgctgctccaactccacctcctgatctctcgtcttgtagtatagccaggattaacgaaaatcaggtggtgccgtacagttgttgcgcgcctaagcctgatgatatggagaaagttccgtattacaagttcccttctatgactaagctccgtgcctgctcatgaagctaatgaggagtatattgccaagtacaatctggcgattagtcgaatgagagatcttgataagacacaacctttaaaccctattggtt

SEQ ID NO: 402 - DNA, 513 bp, Artificial
  Mutation introduced by TALE nuclease pair POT32_T02 within a POT32 allele
gcaagcttgtgcaatagtagtagtacatctctcaaaactccttttacttcttcctccacttctttaacttccactcctaagccctctcaacttttcatccatggaaaacgtaaccaaatgttcaaagtttcatgcaaggttaccaataataacggtgaccaaaaccaaaacgttgaaacgaattctgttgatcgaagaaatgttcttcttggcttaggtggtctttatggtgttgctaatgctataccattagctgcatccgctgctccagctccacctcctgatctctcgtcttgtagtatagccaggattaacgaaaatcaggtggtgccgtacagttgttgcgcgcctaagcctgatgatatggagaaagttccgtattacaagttcccttctatgactaagctcgtcagcctgctcatgaagctaatgaggagtatattgccaagtacaatctggcgattagtcgaatgaaagatcttgataagacacaacctttaaaccctattggtt

SEQ ID NO: 403 - DNA, 460 bp, Artificial
  Mutation introduced by TALE nuclease pair POT32_T02 within a POT32 allele
  misc_feature (272): n is a or c or t or g
gcaagcttgtgcaatagtagtagtacatctctcaaaactccttttacttcttcctccacttctttacttccactcctaaccgcctctcaacttttcatccatggaaaacgtaaccaaatgttcaaagtttcatgcaaggttaccaataataacggtgaccaaaaccaaaacgttgaaacaaattctgttgatcgaagaaatgttcttcttggcttaggtggtctttatggtgttgctaatgctataccattagctgcatccgctactccatntccacctcctgatctctcgtcttgtagtatagccaggattaacgaaaatcaggtggtgccgtacagttgttgcgcgcctaagcctgatgatatggagaaagttccgtattacaagttcccttctatgactaagctccgtcagcctgctcatgaagctaatgaggagtatattgccaagtacaattgcg

SEQ ID NO: 404 - DNA, 475 bp, Artificial
  Mutation introduced by TALE nuclease pair POT32_T02 within a POT32 allele
gcaagcttgtgcaatagtagtagtacatctctcaaaactccttttacttcttcctccacttctttatcttccactcctaagccctctcaacttttcatccatggaaaacgtaaccaaatgttcaaagtttcatgcaaggttaccaataataacggtgaccaaaaccaaaacgttgaaacgaattctgttgatcgaagaaatgttcttcttggcttaggtggtctttatggtgttgctaatgctataccattagctgcatccgctgctccagctccacctcctgatctctcgtcttgtagtatagccaggattaacgaaaatcaggtggtgccgtacagttgttgcgcgcctaagcctgatgatatggagaaagttccgtattacaagttcccttctatgatgaagctaatgaggagtatattgccaagtacaatctggcgattagtcgaatgaaagatcttgataagacacaacc

SEQ ID NO: 405 - DNA, 516 bp, Artificial
  Mutation introduced by TALE nuclease pair POT32_T02 within a POT32 allele
gcaagcttgtgcaatagtagtagtacatctctcaaaactccttttacttcttcctccacttctttatcttccactcctaagcccctctcaacttttcatccatggaaaacgtaaccaaatgttcaaagtttcatgcaaggttaccaataataacggtgaccaaaaccaaaacgttgaaacgaattctgttgatcgaagaaatgttcttcttggcttaggtggtctttatggtgttgctaatgctataccattagctgcatccgctgctccagctccacctcctgatctctcgtcttgtagtatagccaggattaacgaaaatcaggtggtgccgtacagttgttgcgcgcctaagcctgatgatatggagaaagttccgtattacaagttcccttctatgactaagctccgtcagcctgctcatgaagctaatgaggagtatattgccaagtacaatttggcggttagcaagatgaggggatcttgataagacacaacctttaaaccctattggtt

SEQ ID NO: 406 - DNA, 485 bp, Artificial
  Mutation introduced by TALE nuclease pair POT32_T02 within a POT32 allele
gcaagcttgtgcaatagttgtagtacatctctcaaaactccttttacttcttcctccacttctttaacttccactcctaaaccctctcaacttttcatccatggaaaacgtaaccaaatgttcaaagtttcatgcaaggttaccaataataacggtgaccaaaaccaaaacgttgaaacgaattctgttgatcgaagaaatgttcttcttggcttaggtggtctttatggtgttgctaatgctataccattagctgcatccgctactccatctctacctcctgatctctcgtcttgtagtatagccaggattaacgaaactcatgtggtgccgtacagttgttgcgcgcctaagcctgatgatatggagaaagttccgtattacaagttcccttctatgactaagctccgtgctcatgaagctaatgaggagtatattgccaagtacaatttggcggttagcaagatgagggatcttgataagac

SEQ ID NO: 407 - DNA, 453 bp, Artificial
  Mutation introduced by TALE nuclease pair POT32_T02 within a POT32 allele
gcaagcttgtgcaatagtagtagtacatctctcaaaactccttttacttcttcctccacttctttatcttccactcctaagccctctcaacttttcatccatggaaaacgtaaccaaatgttcaaagtttcatgcaaggttaccaataataacggtgaccaaaaccaaaacgttgaaacaaattctgttgatcgaagaaatgttcttcttggcttaggtggtctttatggtgttgctaatgctataccattagctgcatccgctgctccagctccacctcctgatctctcgtcttgtagtatagccaggattaacgaaaatcaggtggtgccgtacagttgttgcgcgcctaagcctgatgatatggagaaagttccgtattacaagttcccttctatgactaagctctgtcagcctgctcatgaagctaatgaggagtatattgccaagtac

SEQ ID NO: 408 - DNA, 461 bp, Artificial
  Mutation introduced by TALE nuclease pair POT32_T02 within a POT32 allele
gcaagcttgtgcaatagtagtagtacatctctcaaaactccttttacttcttcctccacttctttaacttccactcctaagcccctctcaacttttcatccatggaaaacgtaaccaaatgttcaaagtttcatgcaaggttaccaataataacggtgaccaaaaccaaaacgttgaaacgaattctgttgatcgaagaaatgttcttcttggcttaggtggtctttatggtgttgctaatgctataccattagctgcatccgctgctccagctccacctcctgatctctcgtcttgtagtatagccaggattaacgaaaatcaggtggtgccgtacagttgttgcgcgcctaagcctgatgatatggagaaagttccgtattacaagttcccttctatgactaatgctcgcgctgctcatgaagctaatgaggagtatattgccaagtacaattgcgttg

SEQ ID NO: 409 - DNA, 512 bp, Artificial
  Mutation introduced by TALE nuclease pair POT32_T02 within a POT32 allele
  misc_feature (273): n is a or c or t or g
gcaagcttgtgcaatagtagtagtacatctctcaaaactccttttacttcttcctccacttctttaacttccactcctaaccgcctctcaacttttcatccatggaaaacgtaaccaaatgttcaaagtttcatgcaaggttaccaataataacggtgaccaaaaccaaaacgttgaaacgaattctgttgatcgaagaaatgttcttcttggcttaggtggtctttatggtgttgctaatgctataccattagctgcatccgctactccatntccacctcctgatctctcgtcttgtagtatagccaggattaacgaaaatcaggtggtgccgtacagttgttgcgcgcctaagcctgatgatatggagaaagttccgtattacaagttcccttctatgactaagctccgtctgctcatgaagctaatgaggagtatattgccaagtacaatttggcggttagcaagatgaggggatcttgataagacacaacctttaaaccctattggtt

SEQ ID NO: 410 - DNA, 420 bp, Artificial
  Mutation introduced by TALE nuclease pair POT32_T02 within a POT32 allele
gcaagcgttgatgctaatagattagtagtacatccctccaaacatccttttacttcttcctccacttctttaacttccactcctaaaccctctcaacttttcatccatggaaaacgtaaccaaatgttcaaagtttcatgcatggttaccaataataacggtgaccaaaaccaaacgttgaaacgaattctgttgatcgaagaaatgttcttcttggcttaggtggtctttatggtgttgctaatgctataccattagctgcatccgctactccatctccacctcctgatctctcgtcttgtagtatagccaggattaacgaaactcatgtggtgccgtacagttgttgcgcgcctaagcctgatgatatggagaaagttccgtattacaagttcccttctatgactaatcagcctgctc

SEQ ID NO: 411 - DNA, 485 bp, Artificial
  Mutation introduced by TALE nuclease pair POT32_T02 within a POT32 allele
gcaagcttgtgcaatagttgtagtacatccctcaaaactccttttacttcttcctccacttctttaacttccactcctaaaccctctcaacttttcatccatggaaaacgtaaccaaatgttcaaagtttcatgcatggttaccaataataacggtgaccaaaaccaaaacgttgaaacgaattctgttgatcgaagaaatgttcttcttggcttaggtggtctttatggtgttgctaatgctataccattagctgcatccgctactccatctccacctcctgatctctcgtcttgtagtatagccaggattaacgaaactcatgtggtgccgtacagttgttgcgcgcctaagcctgatgatatggagaaagttccgtattacaagttcccttctatgactaagctccatgaagctaatgaggagtatattgccaagtacaatttggcggttagcaagatgagggatcttgataagacacaacc

SEQ ID NO: 412 - DNA, 516 bp, Artificial
  Mutation introduced by TALE nuclease pair POT32_T02 within a POT32 allele
gcaagcttgtgcaatagtagtagtacatctctcaaacatcctttttacttctttcctccacttctttaacttccactcctaagcccctctcaacttttcatccatggaaaacgtaaccaaatgttcaaagtttcatgcaggttaccaataataacggtgaccaaaaccaaaacgttgaaacgaattctgttgatcgaagaaatgttcttcttggcttaggtggtctttatggtgttgctaatgctataccattagctgcatccgctgctccagctccacctcctgatctctcgtcttgtagtatagccaggattaacgaaaatcaggtggtgccgtacagttgttgcgcgcctaagcctgatgatatggagaaagttccgtattacaagttcccttctatgactaagctccgtcagcctgctcatgaagctaatgaggagtatattgccaagtacaatctggcgattagtcgaatgaaagatcttgataagacacaacctttaaaccctattggtt

SEQ ID NO: 413 - DNA, 507 bp, Artificial
  Mutation introduced by TALE nuclease pair POT32_T02 within a POT32 allele
gcaagcttgtgcaatagtagtagtacatctctcaaaactccttttacttcttcctccacttctttatcttccactcctaagcccctctcaacttttcatccatggaaaacgtaaccaaatgttcaaagtttcatgcaaggttatcaataataacggtgaccaaaacgttgaaacgaattctgttgatcgaagaaatgttcttcttggcttaggtggtctttatggtgttgctaatgctataccattagctgcatccgctgctccaactccacctcctgatctctcgtcttgtagtatagccaggattaacgaaaatcaggtggtgccgtacagttgttgcgcgcctaagcctgatgatatggagaaagttccgtattacaagttcccttctatgactaagctccgtgcctgctcatgaagctaatgaggagtatattgccaagtacaatctggcgattagtcgaatgagagatcttgataagacacaacctttaaaccctattggtt

SEQ ID NO: 414 - DNA, 491 bp, Artificial
  Mutation introduced by TALE nuclease pair POT32_T02 within a POT32 allele
gcaagcttgtgcaatagtagtagtacatctctcaaaactccttttacttcttcctccacttctttatcttccactcctaagcccctctcaacttttcatccatggaaaacgtaaccaaatgttcaaagtttcatgcaaggttatcaataataacggtgaccaaaacgttgaaacgaattctgttgatcgaagaaatgttcttcttggcttaggtggtctttatggtgttgctaatgctataccattagctgcatccgctgctccagctccacctcctgatctctcgtcttgtagtatagccaggattaacgaaaatcaggtggtgccgtacagttgttgcgcgcctaagcctgatgatatggagaaagttccgtattacaagttcccttctatgactaagctccgtgaagctaatgaggagtatattgccaagtacaatttggcggttagcaagatgagagatcttgataagacacaacctttaaacccta

SEQ ID NO: 415 - DNA, 501 bp, Artificial
  Mutation introduced by TALE nuclease pair POT32_T02 within a POT32 allele
gcaagcttgtgcaatagttgtagtacatccctcaaaactccttttacttcttcctccacttctttaacttccactcctaaaccctctcaacttttcatccatggaaaacgtaaccaaatgttcaaagtttcatgcatggttaccaataataacggtgaccaaaaccaaaacgttgaaacgaattctgttgatcgaagaaatgttcttcttggcttaggtggtctttatggtgttgctaatgctataccattagctgcatccgctactccatctccacctcctgatctctcgtcttgtagtatagccaggattaacgaaactcatgtggtgccgtacagttgttgcgcgcctaagcctgatgatatggagaaagttccgtattacaagttcccttctttgttcgtcagcctgctcatgaagctaatgaggagtatattgccaagtacaatctggcgattagtcgaatgaaagatcttgataagacacaacctttaaacccta

SEQ ID NO: 416 - DNA, 498 bp, Artificial
  Mutation introduced by TALE nuclease pair POT32_T02 within a POT32 allele
gcaagcttgtgcaatagtagtagtacatctctcaaaactccttttacttcttcctccacttctttacttccactcctaagcccctctcaacttttcatccatggaaaacgtaaccaaatgttcaaagtttcatgcaaggttaccaataataacggtgaccaaaaccaaaacgttgaaacaaattctgttgatcgaagaaatgttcttcttggcttaggtggtctttatggtgttgctaatgctataccattagctgcatccgctgctccagctccacctcctgatctctcgtcttgtagtatagccaggattaacgaaaatcaggtggtgccgtacagttgttgcgcgcctaagcctgatgatatggagaaagttccgtattacaagttcccttctatgactaagctccgtctgcgcctctcatgaagctaatgaggagtatattgccaagtacaatctggcgattagtcgaatgaaagatcttgataagacacaacc

SEQ ID NO: 417 - DNA, 480 bp, Artificial
  Mutation introduced by TALE nuclease pair POT32_T02 within a POT32 allele
gcaagcttgtgcaatagtagtagtacatctctcaaaactccttttacttcttcctccacttctttacttccactcctaagcccctctcaacttttcatccatggaaaacgtaaccaaatgttcaaagtttcatgcaaggttaccaataataacggtgaccaaaaccaaaacgttgaaacaaattctgttgatcgaagaaatgttcttcttggcttaggtggtctttatggtgttgctaatgctataccattagctgcatccgctgctccagctccacctcctgatctctcgtcttgtagtatagccaggattaacgaaaatcaggtggtgccgtacagttgttgcgcgcctaagcctgatgatatggagaaagttccgtattacaagttcccttctatgactaagctccgtctgcacctgctcatgaagctaatgaggagtatattgccaagtacaatctggcgattagtcgaatgaaag

SEQ ID NO: 418 - DNA, 516 bp, Artificial
  Mutation introduced by TALE nuclease pair POT32_T02 within a POT32 allele
gcaagcttgtgcaatagtagtagtacatctctcaaaactccttttacttcttcctccacttctttaacttccactcctaagcccctctcaacttttcatccatggaaaacgtaaccaaatgttcaaagtttcatgcaaggttaccaataataacggtgaccaaaaccaaaacgttgaaacgaattctgttgatcgaagaaatgttcttcttggcttaggtggtctttatggtgttgctaatgctataccattagctgcatccgctgctccagctccacctcctgatctctcgtcttgtagtatagccaggattaacgaaaatcaggtggtgccgtacagttgttgcgcgcctaagcctgatgatatggagaaagttccgtattacaagttcccttctatgactaagctttcgtcagcctgctcatgaagctaatgaggagtatattgccaagtacaatctggcgattagtcgaatgaaagatcttgataagacacaacctttaaaccctattggtt

SEQ ID NO: 419 - DNA, 423 bp, Artificial
  Mutation introduced by TALE nuclease pair POT32_T02 within a POT32 allele
gcaagcttgtgcaatagttgtagtacatccctcaaaactccttttacttcttcctccacttctttaacttccactcctaaaccctctcaacttttcatccatggaaaacgtaaccaaatgttcaaagtttcatgcatggttaccaataataacggtgaccaaaaccaaaacgttgaaacgaattctgttgatcgaagaaatgttcttcttggcttaggtggtctttatggtgttgctaatgctataccattagctgcatccgctactccatctccacctcctgatctctcgtcttgtagtatagccaggattaacgaaactcatgtggtgccgtacagttgttgcgcgcctaagcctgatgatatggagaaagttccaagtacaatctggcgattagtcgaatgaaagatcttgataagacac

SEQ ID NO: 420 - DNA, 460 bp, Artificial
  Mutation introduced by TALE nuclease pair POT32_T02 within a POT32 allele
gcaagcttgtgcaatagtagtagtacatccctcaaaactccttttacttcttcctccacttctttaacttccactcctaaaccctctcaacttttcatccatggaaaacgtaaccaaatgttcaaagtttcatgcatggttaccaataataacggtgaccaaaaccaaaacgttgaaacgaattctgttgatcgaagaaatgttcttcttggcttaggtggtctttatggtgttgctaatgctataccattagctgcatccgctactccatctccacctcctgatctctcgtcttgtagtatagccaggattaacgaaactcatgtggtgccgtacagttgttgcgcgcctaagcctgatgatatggagaaagttccgtattacaagttcccttctatgactaagctccgtctgcctgctcatgaagctaatgaggagtatattgccaagtacaattgcg

SEQ ID NO: 421 - DNA, 507 bp, Artificial
  Mutation introduced by TALE nuclease pair POT32_T02 within a POT32 allele
gcaagcttgtgcaatagttgtagtacatctctcaaaactccttttacttcttcctccacttctttaacttccactcctaaccctctcaacttttcatccatggaaaacgtaaccaaatgttcaaagtttcatgcaaggttaccaataataacggtgaccaaaaccaaaacgttgaaacgaattctgttgatcgaagaaatgttcttcttggcttaggtggtctttatggtgttgctaatgctataccattagctgcatccgctactccatcgtccacctcctgatctctcgtcttgtagtatagccaggattaacgaaactcatgtggtgccgtacagttgttgcgcgcctaagcctgatgatatggagaaagttccgtattacaagttcccttctatgactaagctccgatgctgctcatgagcataatgaggagtatattgccaagtacaatttgggcggttagcaagatgaggggatcttgataagacacaaccttttaaaccc

SEQ ID NO: 422 - DNA, 443 bp, Artificial
  Mutation introduced by TALE nuclease pair POT32_T02 within a POT32 allele
gcaagcttgtgcaatagtagtagtacatctctcaaaactccttttacttcttcctccacttctttatcttccactcctaacgccctctcaacttttcatccatggaaaacgtaaccaaatgttcaaagtttcatgcaaggttaccaataataacggtgaccaaaaccaaaacgttgaaacaaattctgttgatcgaagaaatgttcttcttggcttaggtggtctttatggtgttgctaatgctataccattagctgcatccgctgctccagctccacctcctgatctctcgtcttgtagtatagccaggattaacgaaaatcaggtggtgccgtacagttgttgcgcgcctaagcctgatgatatggagaaagttccgtattacaagttcccttctatgactaagcttcagcctgctcatgaagctaatgaggagtatattg

SEQ ID NO: 423 - DNA, 460 bp, Artificial
  Mutation introduced by TALE nuclease pair POT32_T02 within a POT32 allele
gcaagcttgtgcaatagtagtagtacatctctcaaaactccttttacttcttcctccacttctttatcttccactcctaagcccctctcaacttttcatccatggaaaacgtaaccaaatgttcaaagtttcatgcaaggttaccaataataacggtgaccaaaaccaaaacgttgaaacgaattctgttgatcgaagaaatgttcttcttggcttaggtggtctttatggtgttgctaatgctataccattagctgcatccgctgctccagctccacctcctgatctctcgtcttgtagtatagccaggattaacgaaaatcaggtggtgccgtacagttgttgcgcgcctaagcctgatgatatggagaaagttccgtattacaagttcccttctatgactaagctcgtctgcctgctcatgaagctaatgaggagtatattgccaagtacaattgcg

SEQ ID NO: 424 - DNA, 472 bp, Artificial
  Mutation introduced by TALE nuclease pair POT32_T02 within a POT32 allele
gcaagcttgtgcaatagttgtagtacatctctcaaaactccttttacttcttcctccacttctttaacttccactcctaaaccctctcaacttttcatccatggaaaacgtaaccaaatgttcaaagtttcatgcaaggttaccaataataacggtgaccaaaaccaaaacgttgaaacgaattctgttgatcgaagaaatgttcttcttggcttaggtggtctttatggtgttgctaatgctataccattagctgcatccgctactccatctccacctcctgatctctcgtcttgtagtatagccaggattaacgaaactcatgtggtgccgtacagttgttgcgcgcctaagcctgatgatatggagaaagttccgtattacaagttcccttctatgactaagctctagcctgctcatgaagctaatgaggagtatattgccaagtacaatttggcggttagcaagatga

SEQ ID NO: 425 - DNA, 465 bp, Artificial
  Mutation introduced by TALE nuclease pair POT32_T02 within a POT32 allele
  misc_feature (396); (397); (398); (399); (400); (463); (464): n is a or c or t or g
gcaagcttgtgcaatagtagtagtacatctctcaaaactccttttacttcttcctccacttctttatcttccactcctaagccctctcaacttttcatccatggaaaacgtaaccaaatgttcaaagtttcatgcaaggttaccaataataacggtgaccaaaaccaaaacgttgaaacgaattctgttgatcgaagaaatgttcttcttggcttaggtggtctttatggtgttgctaatgctataccattagctgcatccgctgctccagctccacctcctgatctctcgtcttgtagtatagccaggattaacgaaaatcaggtggtgccgtacagttgttgcgcgcctaagcctgatgatatggagaaagttccgtattacaagttcccttcnnnnncgtctcgtcatgctgctatgaagctaatgatggagtatatgcaagttagtcaagttcaggcgnng

SEQ ID NO: 426 - DNA, 499 bp, Artificial
  Mutation introduced by TALE nuclease pair POT32_T02 within a POT32 allele
gcaagcttgtgcaatagtagtagtacatctctcaaaactccttttacttcttcctccacttctttatcttccactcctaagcccctctcaacttttcatccatggaaaacgtaaccaaatgttcaaagtttcatgcaaggttatcaataataacggtgaccaaaacgttgaaacgaattctgttgatcgaagaaatgttcttcttggcttaggtggtctttatggtgttgctaatgctataccattagctgcatccgctactccagctccacctcctgatctctcatcttgtagtaaagcaaagattaatgaaactacggaggtgccatacagttgttgcgctcccacgccaaaagatatgaagaaagttccatattacaagttcccttctatgactaagctcagcctgctcatgaagctaatgaggagtatattgccaagtacaatctggcgattagtcgaatgaaagatcttgataagacacaacctttaaacccta

SEQ ID NO: 427 - DNA, 467 bp, Artificial
  Mutation introduced by TALE nuclease pair POT32_T02 within a POT32 allele
gcaagcttgtgcaatagtagtagtacatctctcaaaactccttttacttcttcctccacttctttaacttccactcctaagccctctcaacttttcatccatggaaaacgtaaccaaatgttcaaagtttcatgcaaggttaccaataataacggtgaccaaaaccaaaacgttgaaacgaattctgttgatcgaagaaatgttcttcttggcttaggtggtctttatggtgttgctaatgctataccattagctgcatccgctgctccagctccacctcctgatctctcgtcttgtagtatagccaggattaacgaaaatcaggtggtgccgtacagttgttgcgcgcctaagcctgatgatatggagaaagttccgtattacaagttcccttctatgactaagctccgcgtcagcctgctcatgaagctaatgaggagtatattgccaagtacaattgcgttgcg

SEQ ID NO: 428 - DNA, 505 bp, Artificial
  Mutation introduced by TALE nuclease pair POT32_T02 within a POT32 allele
gcaagcttgtgcaatagtagtagtacatctctcaaaactccttttacttcttcctccacttctttatcttccactcctaagcccctctcaacttttcatccatggaaaacgtaaccaaatgttcaaagtttcatgcaaggttaccaataataacggtgaccaaaaccaaaacgttgaaacaaattctgttgatcgaagaaatgttcttcttggcttaggtggtctttatggtgttgctaatgctataccattagctgcatccgctgctccagctccacctcctgatctctcgtcttgtagtatagccaggattaacgaaaatcaggtggtgccgtacagttgttgcgcgcctaagcctgatgatatggagaaagttccgtattacaagttcccttctatgactaaggtcagcctgctcatgaagctaatgaggagtatattgccaagtacaatttggcggttagcaagatgagggatcttgataagacacaacctttaaacccta

SEQ ID NO: 429 - DNA, 513 bp, Artificial
  Mutation introduced by TALE nuclease pair POT32_T02 within a POT32 allele
gcaagcttgtgcaatagtagtagtacatctctcaaaactccttttacttcttcctccacttctttaacttccactcctaagccctctcaacttttcatccatggaaaacgtaaccaaatgttcaaagtttcatgcaaggttaccaataataacggtgaccaaaaccaaaacgttgaaacgaattctgttgatcgaagaaatgttcttcttggcttaggtggtctttatggtgttgctaatgctataccattagctgcatccgctgctccagctccacctcctgatctctcgtcttgtagtatagccaggattaacgaaaatcaggtggtgccgtacagttgttgcgcgcctaagcctgatgatatggagaaagttccgtattacaagttcccttctatgactaagctcgtctgctcctctatgaagctaatgaggagtatattgccaagtacaatctggcgattagtcgaatgaagagtcttgataagacacaacctttaaaccctattggtt

SEQ ID NO: 430 - DNA, 506 bp, Artificial
  Mutation introduced by TALE nuclease pair POT32_T02 within a POT32 allele
gcaagcttgtgcaatagtgtagtacatctctcaaaactccttttacttcttcctccacttctttatcttccactcctaagccctctcaacttttcatccatggaaaacgtaaccaaatgttcaaagtttcatgcaaggttaccaataataacggtgaccaaaaccaaaacgttgaaacgaattctgttgatcgaagaaatgttcttcttggcttaggtggtctttatggtgttgctaatgctataccattagctgcatccgctgctccagctccacctcctgatctctcgtcttgtagtatagccaggattaacgaaaatcaggtggtgccgtacagttgttgcgcgcctaagcctgatgatatggagaaagttccgtattacaagttcccttctatgactaagctccgtcagcctgctcatgaagctaatgaggagtatattgccaagtacaatttggcggttagcaagatgagggatcttgataagacacaacctttaaatccc

SEQ ID NO: 431 - DNA, 510 bp, Artificial
  Mutation introduced by TALE nuclease pair POT32_T02 within a POT32 allele
  misc_feature (262): n is a or c or t or g
gcaagcttgtgcaatagtagtagtacatcctcaaaactccttttacttcttcctccacttctttaacttccactcctaaaccctctcaacttttcatccatggaaaacgtaaccaaatgttcaaagtttcatgcagtgttccaataataacggtgaccaaaaccaaacgttgaaacgaattctgttgatcgaagaaatgttcttcttggcttaggtggtctttatggtgttgctaatgctataccattagctgcatccgctnctccagctccacctcctgatctctcgtcttgtagtatagccaggattaacgaaactcatgtggtgccgtacagttgttgcgcgcctaagcctgatgatatggagaaagttccgtattacaagttcccttctatgactaagctcgtcagcctgctcatgaagctaatgaggagtatattgccaagtacaatctggcgattagtcgaatgaaagatcttgataagacacaacctttaaaccctattggtt

SEQ ID NO: 432 - DNA, 512 bp, Artificial
  Mutation introduced by TALE nuclease pair POT32_T02 within a POT32 allele
gcaagcttgtgcaatagttgtagtacatccctcaaaactccttttacttcttcctccacttctttaacttccactcctaaaccctctcaacttttcatccatggaaaacgtaaccaaatgttcaaagtttcatgcatggttaccaataataacggtgaccaaaaccaaaacgttgaaacgaattctgttgatcgaagaaatgttcttcttggcttaggtggtctttatggtgttgctaatgctataccattagctgcatccgctactccatctccacctcctgatctctcgtcttgtagtatagccaggattaacgaaaatcaggtggtgccgtacagttgttgcgcgcctaagcctgatgatatggagaaagttccgtattacaagttcccttctatgactaagctgtcagcctgctcatgaagctaatgaggagtatattgccaagtacaatctggcgattagtcgaatgaaagatcttgataagacacaacctttaaaccctattggtt

SEQ ID NO: 433 - DNA, 497 bp, Artificial
  Mutation introduced by TALE nuclease pair POT32_T02 within a POT32 allele
gcaagcttgtgcaatagttgtagtacatctctcaaaactccttttacttcttcctccacttctttaacttccactcctaaaccctctcaacttttcatccatggaaaacgtaaccaaatgttcaaagtttcatgcaaggttaccaataataacggtgaccaaaaccaaaacgttgaaacgaattctgttgatcgaagaaatgttcttcttggcttaggtggtctttatggtgttgctaatgctataccattagctgcatccgctactccatctccacctcctgatctctcgtcttgtagtatagccaggattaacgaaactcatgtggtgccgtacagttgttgcgcgcctaagcctgatgatatggagaaagttccgtattacaagttcccttctatgactaagctccgtagcctgctcatgaagctaatgaggagtatattgccaagtacaatttggcggttagcaagatgaggggatcttgataagacacaacc

SEQ ID NO: 434 - DNA, 489 bp, Artificial
  Mutation introduced by TALE nuclease pair POT32_T02 within a POT32 allele
gcaagcttgtgcaatagtagtagtacatctctcaaaactccttttacttcttcctccacttctttatcttccactcctaagccctctcaacttttcatccatggaaaacgtaaccaaatgttcaaagtttcatgcaaggttatcaataataacggtgaccaaaacgttgaaacgaattctgttgatcgaagaaatgttcttcttggcttaggtggtctttatggtgttgctaatgctataccattagctgcatccgctgctccagctccacctcctgatctctcgtcttgtagtatagccaggattaacgaaaatcaggtggtgccgtacagttgttgcgcgcctaagcctgatgatatggagaaagttccgtattacaagttcccttctatgacttgctcatgaagctaattgaggagtatattgccaagtacaatctggcgattagtcgaatgaaagatcttgataagacacaacctttaaacccta

SEQ ID NO: 435 - DNA, 510 bp, Artificial
  Mutation introduced by TALE nuclease pair POT32_T02 within a POT32 allele
gcaagcttgtgcaatagtagtagtacatctctcaaaactccttttacttcttcctccacttctttatcttccactcctaagcccctctcaacttttcatccatggaaaacgtaaccaaatgttcaaagtttcatgcaaggttaccaataataacggtgaccaaaaccaaaacgttgaaacgaattctgttgatcgaagaaatgttcttcttggcttaggtggtctttatggtgttgctaatgctataccattagctgcatccgctgctccagctccacctcctgatctctcgtcttgtagtatagccaggattaacgaaaatcaggtggtgccgtacagttgttgcgcgcctaagcctgatgatatggagaaagttccgtattacaagttcccttctatgactaagctagcctgctcatgaagctaatgaggagtatattgccaagtacaatttggcggttagcaagatgagggatcttgataagacacaacctttaaaccctattggtt

SEQ ID NO: 436 - DNA, 478 bp, Artificial
  Mutation introduced by TALE nuclease pair POT32_T02 within a POT32 allele
gcaagcttgtgcaatagtagtagtacatctctcaaaactccttttacttcttcctccacttctttatcttccactcctaaaccctctcaacttttcatccatggaaaacgtaaccaaatgttcaaagtttcatgcatggttaccaataataacggtgaccaaaaccaaaacgttgaaacgaattctgttgatcgaagaaatgttcttcttggcttaggtggtctttatggtgttgctaatgctataccattagctgcatccgctactccatctccacctcctgatctctcgtcttgtagtatagccaggattaacgaaactcatgtggtgccgtacagttgttgcgcgcctaagcctgatgatatggagaaagttccgtattacaagtcttcgtcagcctgctcatgaagctaatgaggagtatattgccaagtacaatctggcgattagtcgaatgaaagatcttgataagacacaa

SEQ ID NO: 437 - DNA, 509 bp, Artificial
  Mutation introduced by TALE nuclease pair POT32_T02 within a POT32 allele
gcaagcttgtgcaatagttgtagtacatccctcaaaactccttttacttcttcctccacttctttaacttccactcctaaaccctctcaacttttcatccatggaaaacgtaaccaaatgttcaaagtttcatgcatggttaccaataataacggtgaccaaaaccaaaacgttgaaacgaattctgttgatcgaagaaatgttcttcttggcttaggtggtctttatggtgttgctaatgctataccattagctgcatccgctactccatctccacctcctgatctctcgtcttgtagtatagccaggattaacgaaactcatgtggtgccgtacagttgttgcgcgcctaagcctgatgatatggagaaagttccgtattacaagttcccttctatgactacgtcagcctgctcatgaagctaatgaggagtatattgccaagtacaatctggcgattagtcgaatgaaagatcttgataagacacaacctttaaaccctattggtt

SEQ ID NO: 438 - DNA, 511 bp, Artificial
  Mutation introduced by TALE nuclease pair POT32_T02 within a POT32 allele
gcaagcttgtgcaatagtagtagtacatccctcaaaactccttttacttcttcctccacttctttaacttccactcctaaaccctctcaacttttcatccatggaaaacgtaaccaaatgttcaaagtttcatgcatggttaccaataataacggtgaccaaaaccaaaacgttgaaacgaattctgttgatcgaagaaatgttcttcttggcttaggtggtctttatggtgttgctaatgctataccattagctgcatccgctactccatctccacctcctgatctctcgtcttgtagtatagccaggattaacgaaactcatgtggtgccgtacagttgttgcgcgcctaagcctgatgatatggagaaagttccgtattacaagttcccttctatgactaagctccagcctgctcatgaagctaatgaggagtatattgccaagtacaatttggcggttagcaagatgagggatcttgataagacacaacctttaaaccctattggtt

SEQ ID NO: 439 - DNA, 515 bp, Artificial
  Mutation introduced by TALE nuclease pair POT32_T02 within a POT32 allele
gcaagcttgtgcaatagttgtagtacatccctcaaaactccttttacttcttcctccacttctttaacttccactcctaagcccctctcaacttttcatccatggaaaacgtaaccaaatgttcaaagtttcatgcaaggttaccaataataacggtgaccaaaaccaaaacgttgaaacgaattctgttgatcgaagaaatgttcttcttggcttaggtggtctttatggtgttgctaatgctataccattagctgcatccgctgctccagctccacctcctgatctctcgtcttgtagtatagccaggattaacgaaaatcaggtggtgccgtacagttgttgcgcgcctaagcctgatgatatggagaaagttccgtattacaagttcccttctatgactaagctccgtcagcctgctcatgaagctaatgaggagtatattgccaagtacaatctggcgattagtcgaatgaaagatcttgataagacacaacctttaaaccctattggtt

SEQ ID NO: 440 - DNA, 518 bp, Artificial
  Mutation introduced by TALE nuclease pair POT32_T02 within a POT32 allele
gcaagcttgtgcaatagtagtagtacatctctcaaaactccttttacttcttcctccacttctttacttccactcctaagcccctctcaacttttcatccatggaaaacgtaaccaaatgttcaaagtttcatgcaaggttaccaataataacggtgaccaaaaccaaaacgttgaaacaaattctgttgatcgaagaaatgttcttcttggcttaggtggtctttatggtgttgctaatgctataccattagctgcatccgctgctccagctccacctcctgatctctcgtcttgtagtatagccaggattaacgaaaatcaggtggtgccgtacagttgttgcgcgcctaagcctgatgatatggagaaagttccgtattacaagttcccttctatgactaagctccgtcgtgcatcctgctcatgaagctaatgaggagtatattgccaagtacaatctggcgattagtcgaatgaaagatcttgataagacacaacctttaaaccctattggtt

SEQ ID NO: 441 - DNA, 515 bp, Artificial
  Mutation introduced by TALE nuclease pair POT32_T02 within a POT32 allele
gcaagcttgtgcaatagtagtagtacatccctcaaaactccttttacttcttcctccacttctttaacttccactcctaaaccctctcaacttttcatccatggaaaacgtaaccaaatgttcaaagtttcatgcatggttaccaataataacggtgaccaaaaccaaaacgttgaaacgaattctgttgatcgaagaaatgttcttcttggcttaggtggtctttatggtgttgctaatgctataccattagctgcatccgctactccatctccacctcctgatctctcgtcttgtagtatagccaggattaacgaaaatcaggtggtgccgtacagttgttgcgcgcctaagcctgatgatatggagaaagttccgtattacaagttcccttctatgactaagctccgttcagcctgctcatgaagctaatgaggagtatattgccaagtacaatctggcgattagtcgaatgagagatcttgataagacacaacctttaaaccctattggtt

SEQ ID NO: 442 - DNA, 500 bp, Artificial
  Mutation introduced by TALE nuclease pair POT32_T02 within a POT32 allele
gcaagcttgtgcaatagttgtagtacatctctcaaaactccttttacttcttcctccacttctttaacttccactcctaaaccctctcaacttttcatccatggaaaacgtaaccaaatgttcaaagtttcatgcatggttaccaataataacggtgaccaaaaccaaaacgttgaaacgaattctgttgatcgaagaaatgttcttcttgggcttaggtggtctttatggtgttgctaatgctataccattagctgcatccgctactccatctccacctcctgatctctcgtcttgtagtatagccaggattaacgaaactcatgtggtgccgtacagttgttgcgcgcctaagcctgatgatatggagaaagttccgtattacaagttcccttctatgttagcctgctcatgaagctaatgaggagtatattgccaagtacaattttgggcggttagcaagatgagggatcttgataagacacaacctttaaacccta

SEQ ID NO: 443 - DNA, 495 bp, Artificial
  Mutation introduced by TALE nuclease pair POT32_T02 within a POT32 allele
gcaagcttgtgcaatagtagtagtacatctctcaaaactccttttacttcttcctccacttctttatcttccactcctaagcccctctcaacttttcatccatggaaaacgtaaccaaatgttcaaagtttcatgcaaggttaccaataataacggtgaccaaaaccaaaacgttgaaacaaaattctgttgatcgaagaaatgttcttcttggcttaggtggtctttatggtgttgctaatgctataccattagctgcatccgctgctccagctccacctcctgatctctcgtcttgtagtatagccaggattaacgaaaatcaggtggtgccgtacagttgttgcgcgcctaagcctgatgatatggagaaagttccgtattacaagttcccttctatgactaagccagcctgctcatgaagctaatgaggagtatattgccaagtacaatctggcgattagtcgaatgaaagatcttgataagacacaaccc

SEQ ID NO: 444 - DNA, 484 bp, Artificial
  Mutation introduced by TALE nuclease pair POT32_T02 within a POT32 allele
gcaagcttgtgcaatagtagtagtacatctctcaaaactccttttacttcttcctccacattctttatcttccactcctaagccctctcaacttttcatccatggaaaacgtaaccaaatgttcaaagtttcatgcaaggttatcaataataacggtgaccaaaacgttgaaacgaattcatgttgatcgaagaaatgttcttcttggcttaggtggtctttatggtgttgctaatgctataccattagctgcatccgctgctccaactccacctcctgatctctcgtcttgtcagtatagcccaggattaacgaaaatcaggtggtgccgtacagttgttgcgcgcctaagcctgatgatatggagaaagttccgtattacaagttcccttctatgactaaagctccgttcagcctgctcatgaagctaatgaggagtatattgccaagtacaatctggcgattagtcgaatgagagatcttg

SEQ ID NO: 445 - DNA, 498 bp, Artificial
  Mutation introduced by TALE nuclease pair POT32_T02 within a POT32 allele
gcaagcttgtgcaatagtagtagtacatctctcaaaactccttttacttcttcctccacttctttatcttccactcctaagccctctcaacttttcatccatagaaacagcataccaaatgttcaaatgttcagtgcaaggttaccaataataacggtgaccaaaaccaaaacgttgaaacaaaattctgttgatcgaagaaatgttcttcttggcttaggtggtctttatggtgttgctaatgctataccattagctgcatccgctgctccagctccacctcctgatctctcgtcttgtagtatagccaggattaacgaaaatcaggtggtgccgtacagttgttgcgcgcctaagcctgatgatatggagaaagttccgtattacaagttcccttctatgactaagctccgtgctcatgaagctaatgaggagtatattgccaagtacaatctggcgattagtcgaatgaaagatcttgataagacacaacccttt

SEQ ID NO: 446 - DNA, 515 bp, Artificial
  Mutation introduced by TALE nuclease pair POT32_T02 within a POT32 allele
gcaagcttgtgcaatagtagtagtacatctctcaaaactccttttacttcttcctccacttctttaacttccactcctaagcccctctcaacttttcatccatggaaaacgtaaccaaatgttcaaagtttcatgcaaggttaccaataataacggtggccaaaaccaaaacgttgaaacaaattctgttgatcgaagaaatgttcttcttggcttaggtggtctttatggtgttgctaatgctataccattagctgcatccgctgctccagctccacctcatgatctctcgtcttgtagtatagccaggattaacgaaaatcaggtggtgccgtacagttgttgcgcgcctaagcctgatgatatggagaaagttccgtattacaagttcccttctatgactaagctccgtcagcctgctcatgaagctaatgaggagtatattgccaagtacaatttggcggttagcaagatgagggatcttgataagacacaacctttaaaccctattggtt

SEQ ID NO: 447 - DNA, 461 bp, Artificial
  Mutation introduced by TALE nuclease pair POT32_T02 within a POT32 allele
  misc_feature (151); (154): n is a or c or t or g
gcaagcttgtgcaatagttgtagtacatccctcaaaactccttttacttcttcctccacttctttaacttccactcctaaaccctctcaacttttcatccatggaaaacgtaaccaaatgttcaaagtttcatgcagttgctatcaataanagngcgaaccaaaacagttgaaacgaattctgttgatcgaagaaatgttcttcttggcttaggtggtctttatggtgttgctaatgctataccattagctgcatccgctgctccagctccacctcctgatctctcgtcttgtagtatagcccaggattaacgaaaatcaggtggtgccgtacagttgttgcgcgcctaagcctgatgatatggagaaagttccgttattacaagttcccttctatgactaagctccgtcagcctgctcatgaagctaatgaggagtatattgccaagtacaattgcgttg

SEQ ID NO: 448 - DNA, 506 bp, Artificial
  Mutation introduced by TALE nuclease pair POT32_T02 within a POT32 allele
gcaagcttgtgcaatagttgtagtacatccctcaaaactccttttacttcttcctccacttctttaacttccactcctaaaccctctcaacttttcatccatggaaaacgtaaccaaatgttcaaagtttcatgcatggttaccaataataacggtgaccaaaaccaaaacgttgaaacgaattctgttgatcgaagaaatgttcttcttggcttaggtggtctttatggtgttgctaatgctataccattagctgcatccgctactccatctccacctcctgatctctcgtcttgtagtatagccaggattaacgaaactcatgtggtgccgtacagttgttgcgcgcctaagcctgatgatatggagaaagttccgtattacaagttcccttctatgactaagctccgtcagcctgctcatgaagctaatgaggagtatattgccaagtacaatttggcggttagcaagatgagggatcttgataagacacaacctttaaaccc

SEQ ID NO: 449 - DNA, 476 bp, Artificial
  Mutation introduced by TALE nuclease pair POT32_T02 within a POT32 allele
gcaagcttgtgcaatagtagtagtacatctctcaaaactccttttacttcttcctccacttctttaacttccactcctaaaccctctcaacttttcatccatggaaaacgtaaccaaatgttcaaagtttcatgcatggttaccaataataacggtgaccaaaaccaaaacgttgaaacgaattctgttgatcgaagaaatgttcttcttggcttaggtggtctttatggtgttgctaatgctataccattagctgcatccgctactccatctccacctcctgatctctcgtcttgtagtatagccaggattaacgaaactcatgtggtgccgtacagttgttgcgcgcctaagcctgatgatatggagaaagttctcagcctgctcatgagctaatgaggagtatattgccaagtacaatttggcggttagcaagatgaggggatcttgataagacacaacctttaaaccctatt

SEQ ID NO: 450 - DNA, 515 bp, Artificial
  Mutation introduced by TALE nuclease pair POT32_T02 within a POT32 allele
gcaagcttgtgcaatagtagtagtacatctctcaaaactccttttacttcttcctccacttctttatcttccactcctaagcccctctcaacttttcatccatggaaaacgtaaccaaatgttcaaagtttcatgcaaggttaccaataataacggtgaccaaaaccaaaacgttgaaacaaattctgttgatcgaagaaatgttcttcttggcttaggtggtctttatggtgttgctaatgctataccattagctgcatccgctgctccagctccacctcctgatctctcgtcttgtagtatagccaggattaacgaaaatcaggtggtgccgtacagttgttgcgcgcctaagcctgatgatatggagaaagttccgtattacaagttcccttctatgactaagctcagtcagcctgctcatgaagctaatgaggagtatattgccaagtacaatctggcgattagtcgaatgaaagatcttgataagacacaacctttaaaccctattggtt

SEQ ID NO: 451 - DNA, 446 bp, Artificial
  Mutation introduced by TALE nuclease pair POT32_T02 within a POT32 allele
gcaagcttgttcaatagtagtagtacatctctcaaaactccttttacttcttcctccacttctttaacttccactcctaagcccctctcaacttttcatccatggaaaacgtaaccaaatgttcaaagtttcatgcaaggttaccaataataacggtgaccaaaaccaaaacgttgaaacgaattctgttgatcgaagaaatgttcttcttggcttaggtggtctttatggtgttgctaatgctataccattagctgcatccgctgctccagctccacctcctgatctctcgtcttgtagtatagcccaggatttaacgaaaatcaggtggttgccgtacagttgttgcgcgcctaagcctgatgatatggagaaagttccgtattacaagttcccttctatgactaagctcagcctgctcatgaagctaatgagggagtatattg

SEQ ID NO: 452 - DNA, 510 bp, Artificial
  Mutation introduced by TALE nuclease pair POT32_T02 within a POT32 allele
gcaagcttgtgcaatagttgtagtacatctctcaaaactccttttacttcttcctccacttctttaacttccactcctaaaccctctcaacttttcatccatggaaaacgtaaccaaatgttcaaagtttcatgcaaggttaccaataataacggtgaccaaaaccaaaacgttgaaacgaattctgttgatcgaagaaatgttcttcttggcttaggtggtctttatggtgttgctaatgctataccattagctgcatccgctactccatctccacctcctgatctctcgtcttgtagtatagccaggattaacgaaactcatgtggtgccgtacagttgttgcgcgcctaagcctgatgatatggagaaagttccgtattacaagttcccttctatgactaagctcagcctgctcatgaagctaatgaggagtatattgccaagtacaatttggcggttagcaagatgagggatcttgataagacacaacctttaaaccctattggtt

SEQ ID NO: 453 - DNA, 494 bp, Artificial
  Mutation introduced by TALE nuclease pair POT32_T02 within a POT32 allele
gcaagcttgtgcaatagtagtagtacatctctcaaaactccttttacttcttcctccacttctttatcttccactcctaagcccctctcaacttttcatccatggaaaacgtaaccaaatgttcaaagtttcatgcaaggttaccaataataacggtgaccaaaaccaaaacgttgaaacaaaattctgttgatcgaagaaatgttcttcttggcttaggtggtctttatggtgttgctaatgctataccattagctgcatccgctgctccagctccacctcctgatctctcgtcttgtagtatagccaggattaacgaaaatcaggtggtgccgtacagttgttgcgcgcctaagcctgatgatatggagaaagttccgtattacaagttcccttctatgactaaggtcagcctgctcatgaagctaatgaggagtatattgccaagtacaatttggcggttagcaagatgaggggatcttgataagacacaa

SEQ ID NO: 454 - DNA, 482 bp, Artificial
  Mutation introduced by TALE nuclease pair POT32_T02 within a POT32 allele
gcaagcttgtgcaatagtagtagtacatctctcaaaactccttttacttcttcctccacttctttaacttccactcctaagcccctctcaacttttcatccatggaaaacgtaaccaaatgttcaaagtttcatgcaaggttaccaataataacggtgaccaaaaccaaaacgttgaaacgaattctgttgatcgaagaaatgttcttcttggcttaggtggtctttatggtgttgctaatgctataccattagctgcatccgctgctccagctccacctcctgatctctcgtcttgtagtatagccaggattaacgaaaatcaggtggtgccgtacagttgttgcgcgcctaagcctgatgatatggagaaagttccgtattacaagttcccttctatgactaagctctgctcatgaagctaaatgaggagtatattgccaaagtacaatttggcggttagcaagatgaggggatcttgat

SEQ ID NO: 455 - DNA, 512 bp, Artificial
  Mutation introduced by TALE nuclease pair POT32_T02 within a POT32 allele
gcaagcttgtgcaatagtagtagtacatctctcaaaactccttttacttcttcctccacttctttaacttccactcctaagccctctcaacttttcatccatggaaaacgtaaccaaatgttcaaagtttcatgcaaggttaccaataataacggtgaccaaaaccaaaacgttgaaacgaattctgttgatcgaagaaatgttcttcttggcttaggtggtctttatggtgttgctaatgctataccaatagctgcatccgctgctccagctccacctcctgatctctcgtcttgtagtatagccaggattaacgaaaatcaggtggtgccgtacagttgttgcgcgcctaagcctgatgatatggagaaagttccgtattacaagttcccttctatgactaagctccgagactgctcatgaagctaatgaggagtatattgccaagtacaatctggcgattagtcgaatgaaagatcttgataagacacaacctttaaaccctattggtt

SEQ ID NO: 456 - DNA, 514 bp, Artificial
  Mutation introduced by TALE nuclease pair POT32_T02 within a POT32 allele
gcaagcttgtgcaatagtagtagtacatctctcaaaactccttttacttcttcctccacttctttatcttccactcctaagccctctcaacttttcatccatggaaaacgtaaccaaatgttcaaagtttcatgcaaggttaccaataataacggtgaccaaaaccaaaacgttgaaacgaattctgttgatcgaagaaatgttcttcttggcttaggtggtctttatggtgttgctaatgctataccattagctgcatcccgctgctccagctccacctcctgatctctcgtcttgtagtatagccaggattaacgaaaatcaggtggtgccgtacagttgttgcgcgcctaaggcctgatgatatggagaaagttccgtattacaagttcccttctatgactaagctccagcctgctcatgaagctaatgaggagtatattgccaagtacaatttggcggttagcaagatgaggggatcttgataagacacaacctttaaaccctattggtt

SEQ ID NO: 457 - DNA, 468 bp, Artificial
  Mutation introduced by TALE nuclease pair POT32_T02 within a POT32 allele
gcaagcttgtgcaatagtagtagtacatctctcaaaactccttttacttcttcctccacttctttatcttccactcctaagcccctctcaacttttcatccatggaaaacgtaaccaaatgttcaaagtttcatgcaaggttaccaataataacggtgaccaaaaccaaaacgttgaaacaaattctgttgatcgaagaaatgttcttcttggcttaggtggtctttatggtgttgctaatgctataccattagctgcatccgctgctccagctccacctcctgatctctcgtcttgtagtatagccaggattaacgaaaatcaggtggtgccgtacagttgttgcgcgcctaagcctgatgatatcgtcagcctgctcatgaagctaatgaggagtatattgccaagtacaatctggcgattagtcgaatgaaagatcttgataagacacaacctttaaaccctatt

SEQ ID NO: 458 - DNA, 511 bp, Artificial
  Mutation introduced by TALE nuclease pair POT32_T02 within a POT32 allele
gcaagcttgtgcaatagttgtagtacatcctcaaaactccttttacttcttcctccacttctttaacttccactcctaaaccctctcaacttttcatccatggaaaacgtaaccaaatgttcaaagtttcatgcatggttaccaataataacggtgaccaaaaccaaaacgttgaaacgaattctgttgatcgaagaaatgttcttcttggcttaggtggtctttatggtgttgctaatgctataccattagctgcatccgctactccatctccacctcctgatctctcgtcttgtagtatagccaggattaacgaaactcatgtggtgccgtacagttgttgcgcgcctaagcctgatgatatggagaaagttccgtattacaagttcccttctatgactaagctccagcctgctcatgaagctaatgaggagtatattgccaagtacaatttggcggttagcaagatgaggggatcttgataagacacaacctttaaaccctattggtt

SEQ ID NO: 459 - DNA, 479 bp, Artificial
  Mutation introduced by TALE nuclease pair POT32_T02 within a POT32 allele
gcaagcttgtgcaatagtagtagtacatctctcaaaactccttttacttcttcctccacttctttaacttccactcctaagccctctcaacttttcatccatggaaaacgtaaccaaatgttcaaagtttcatgcaaggttaccaataataacggtgaccaaaaccaaaacgttgaaacgaattctgttgatcgaagaaatgttcttcttggcttaggtggtctttatggtgttgctaatgctataccattagctgcatccgctgctccagctccacctcctgatctctcgtcttgtagtatagccaggattaacgaaaatcaggtggtgccgtacagttgttgcgcgcctaagcctgatgatatggagaaagttccgtattacaagttcccttctatgactaagctagctaatgaggagtatattgccaagtacaatttggcggttagcaagatgagggatcttgataagacacaacc

SEQ ID NO: 460 - DNA, 515 bp, Artificial
  Mutation introduced by TALE nuclease pair POT32_T02 within a POT32 allele
gcaagcttgtgcaatagtagtagtacatctctcaaaactccttttacttcttcctccacttctttaacttccactcctaagccctctcaacttttcatccatggaaaacgtaaccaaatgttcaaagtttcatgcaaggttaccaataataacggtgaccaaaaccaaaacgttgaaacgaattctgttgatcgaagaaatgttcttcttggcttaggtggtctttatggtgttgctaatgctataccattagctgcatccgctgctccagctccacctcctgatctctcgtcttgtagtatagccaggattaacgaaaatcaggtggtgccgtacagttgttgcgcgcctaagcctgatgatatggagaaagttccgtattacaagttcccttctatgactaagctttcgtcagcctgctcatgaagctaatgaggagtatattgccaagtacaatctggcgattagtcgaatgaaagatcttgataagacacaacctttaaaccctattggtt

SEQ ID NO: 461 - DNA, 510 bp, Artificial
  Mutation introduced by TALE nuclease pair POT32_T02 within a POT32 allele
gcaagcttgtgcaatagtagtagtacatctctcaaaactccttttacttcttcctccacttctttaacttccactcctaagccctctcaacttttcatccatggaaaacgtaaccaaatgttcaaagtttcatgcaaggttaccaataataacggtgccaaaaccaaaacgttgaaacgaattctgttgatcgaagaaatgttcttcttggcttaggtggtctttatggtgttgctaatgctataccattagctgcatccgctgctccagctccacctcctgatctctcgtcttgtagtatagccaggattaacgaaaatcaggtggtgccgtacagcttgttgcgcgccttaagcctgatgatatggagaaagttccgtattacaagttcccttctatgactaacgtcagcctgctcatgaagctaatgaggagtatattgccaagtacaatctggcgattagtcgaatgaaagatcttgataagacacaacctttaaaccctatggtt

SEQ ID NO: 462 - DNA, 521 bp, Artificial
  Mutation introduced by TALE nuclease pair POT32_T02 within a POT32 allele
gcaagcgtgatgctaatagatagtagtacatctctcaaacatccttttacttcttcctccacttctttaacttccactcctaagccctctcaacttttcatccatggaaaacgtaaccaaatgttcaaagtttcatgcaaggttaccaataataacggtgaccaaaaccaaaacgttgaaacaaattctgttgatcgaagaaatgttcttcttggcttaggtggtctttatggtgttgctaatgctataccattagctgcatccgctgctccagctccacctcctgatctctcgtcttgtagtatagccaggattaacgaaaatcaggtggtgccgtacagttgttgcgcgcctaagcctgatgatatggagaaagttccgtattacaagttcccttctatgactaagctccgtcgtcagcctgctcatgaaagctaatgaggagtatattgccaagtacaatctggcgattagtcgaatgaaagatcttgataagacacaacctttaaaccctattggtt

SEQ ID NO: 463 - DNA, 470 bp, Artificial
  Mutation introduced by TALE nuclease pair POT32_T02 within a POT32 allele
gcaagcttgtgcaatagtagtagtacatctctcaaaactccttttacttcttcctccacttctttatcttccactcctaagcccctctcaacttttcatccatggaaaacgtaaccaaatgttcaaagtttcatgcaaggttatcaataataacggtgaccaaaacgttgaaacgaaattctgttgatcgaagaaatgttcttcttggcttaggtggtctttatggtgttgctaatgctataccattagctgcatccgctgctccaactccacctcctgatctctcgtcttgtagtatagccaggattaacgaaaatcaggtggtgccgtacagttgttgcgcgcctaagcctgatgatatggagaaagttccgtattacaagttcccttctatgactaagctcctcagcctgctcatgaagctaatgaggagtatattgccaagtacaatttggcggttagcaagatga

SEQ ID NO: 464 - DNA, 461 bp, Artificial
  Mutation introduced by TALE nuclease pair POT32_T02 within a POT32 allele
  misc_feature (271): n is a or c or t or g
gcaagcttgtgcaatagtgtagtacatctctcaaaactccttttacttcttcctccacttctttaacttccactcctaaccctctcaacttttcatccatggaaaacgtaaccaaatgttcaaagtttcatgcaaggttaccaataataacggtgaccaaaaccaaaacgttgaaacgaaattctgttgatcgaagaaatgttcttcttggcttaggtggtctttatggtgttgctaatgctataccattagctgcatccgctactccatntccacctcctgatctctcgtcttgtagtatagccaggattaacgaaaatcaggtggtgccgtacagttgttgcgcgcctaagcctgatgatatggagaaagttccgtattacaagttcccttctatgactaagctcctcagcctgctcatgaagctaatgaggagtatattgccaagtacaattgcgttg

SEQ ID NO: 465 - DNA, 495 bp, Artificial
  Mutation introduced by TALE nuclease pair POT32_T02 within a POT32 allele
gcaagcttgtgcaatagtagtagtacatctctcaaaactccttttacttcttcctccacttctttaacttccactcctaagccctctcaacttttcatccatggaaaacgtaaccaaatgttcaaagtttcatgcaaggttaccaataataacggtgaccaaaaccaaaacgttgaaacgaattctgttgatcgaagaaatgttcttcttggcttaggtggtctttatggtgttgctaatgctataccaatagctgcatccgctgctccagctccacctcctgatctctcgtcttgtagtatagccaggattaacgaaaatcaggtggtgccgtacagttgttgcgcgcctaagcctgatgatatggagaaagttccgtattacaagttcccttctatgactaagctccgagactgctcatgaagctaatgaggagtatattgccaagtacaatctggcgattagtcgaatgaaagatcttgataagacacaacc

SEQ ID NO: 466 - DNA, 495 bp, Artificial
  Mutation introduced by TALE nuclease pair POT32_T02 within a POT32 allele
gcaagcttgtgcaatagtagtagtacatccctcaaaactccttttacttcttcctccacttctttaacttccactcctaaaccctctcaacttttcatccatggaaaacgtaaccaaatgttcaaagtttcatgcatggttaccaataataacggtgaccaaaaccaaaacgttgaaacgaattctgttgatcgaagaaatgttcttcttggcttaggtggtctttatggtgttgctaatgctataccattagctgcatccgctactccatctccacctcctgatctctcgtcttgtagtatagccaggattaacgaaactcatgtggtgccgtacagttgttgcgcgcctaagcctgatgatatggagaaagttccgtattacaagttcccttctatgacttgctcatgaagctaatgaggagtatattgccaagtacaatttggcggttagcaagatgaggggatcttgataagacacaacctttaaacccta

SEQ ID NO: 467 - DNA, 518 bp, Artificial
  Mutation introduced by TALE nuclease pair POT32_T02 within a POT32 allele
gcaagcttgtgcaatagtagtagtacatctctcaaaactccttttacttcttcctccacttctttatcttccactcctaagcccctctcaacttttcatccatggaaaacgtaaccaaatgttcaaagtttcatgcaaggttaccaataataacggtgaccaaaaccaaaacgttgaaacaaattctgttgatcgaagaaatgttcttcttggcttaggtggtctttatggtgttgctaatgctataccattagctgcatccgctgctccagctccacctcctgatctctcgtcttgtagtatagccaggattaacgaaaatcaggtggtgccgtacagttgttgcgcgcctaagcctgatgatatggagaaagttccgtattacaagttcccttctatgactaagctccgtcgtcagcctgctcatgaagctaatgaggagtatattgccaagtacaatctggcgattagtcgaatgaaagatcttgataagacacaacctttaaaccctattggtt

SEQ ID NO: 468 - DNA, 515 bp, Artificial
  Mutation introduced by TALE nuclease pair POT32_T02 within a POT32 allele
gcaagcttgtgcaatagttgtagtacatccctcaaaactccttttacttcttcctccacttctttaacttccactcctaaaccctctcaacttttcatccatggaaaacgtaaccaaatgttcaaagtttcatgcatggttaccaataataacggtgaccaaaaccaaaacgttgaaacgaattctgttgatcgaagaaatgttcttcttgggcttaggtggtctttatggtgttgctaatgctataccattagctgcatccgctactccatctccacctcctgatctctcgtcttgtagtatagccaggattaacgaaactcatgtggtgccgtacagttgttgcgcgcctaagcctgatgatatggagaaagttccgtattacaagttcccttctatgactaagctccgtcagcctgctcatgaagctaatgaggagtatattgccaagtacaatctggcgattagtcgaatgaaagatcttgataagacacaacctttaaaccctattggtt

SEQ ID NO: 469 - DNA, 506 bp, Artificial
  Mutation introduced by TALE nuclease pair POT32_T02 within a POT32 allele
gcaagcttgtgcaatagtagtagtacatctctcaaaactccttttacttcttcctccacttctttatcttccactcctaagccctctcaacttttcatccatggaaaacgtaaccaaatgttcaaagtttcatgcaaggttaccaataataacggtgaccaaaaccaaaacgttgaaacgaattctgttgatcgaagaaatgttcttcttggcttaggtggtctttatggtgttgctaatgctataccattagctgcatccgctgctccagctccacctcctgatctctcgtcttgtagtatagccaggattaacgaaaatcaggtggtgccgtacagttgttgcgcgcctaagcctgatgatatggagaaagttccgtattacaagttcccttctatgactaagctccgtcagcctgctcatgaagctaatgaggagtatattgccaagtacaatttggcggttagcaagatgagggatcttgataagacacaacctttaaaccc

SEQ ID NO: 470 - DNA, 477 bp, Artificial
  Mutation introduced by TALE nuclease pair POT32_T02 within a POT32 allele
gcaagcttgtgcaatagtagtagtacatctctcaaaactccttttacttcttcctccacttctttaacttccactcctaaaccctctcaacttttcatccatggaaaacgtaaccaaatgttcaaagtttcatgcatggttaccaataataacggtgaccaaaaccaaaacgttgaaacgaattctgttgatcgaagaaatgttcttcttggcttaggtggtctttatggtgttgctaatgctataccattagctgcatccgctactccatctccacctcctgatctctcgtcttgtagtatagccaggattaacgaaactcatgtggtgccgtacagttgttgcgcgcctaagcctgatgatatggagaaagttctcagcctgctcatgaagctaatgaggagtatattgccaagtacaatttggcggttagcaagatgaggggatcttgataagacacaacctttaaaccctatt

SEQ ID NO: 471 - DNA, 512 bp, Artificial
  Mutation introduced by TALE nuclease pair POT32_T02 within a POT32 allele
gcaagcttgtgcaatagtagtagtacatctctcaaaactccttttacttcttcctccacttctttatcttccactcctaagcccctctcaacttttcatccatggaaaacgtaaccaaatgttcaaagtttcatgcaaggttatcaataataacggtgaccaaaacgttgaaacgaattctgttgatcgaagaaatgttcttcttggcttaggtggtctttatggtgttgctaatgctataccattagctgcatccgctgctccaactccacctcctgatctctcgtcttgtagtatagccaggattaacgaaaatcaggtggtgccgtacagttgttgcgcgcctaagcctgatgatatggagaaagttccgtattacaagttcccttctatgactaagctccgtcgtgcgcctgctcatgaagctaatgaggagtatattgccaagtacaatctggcgattagtcgaatgaagagtcttgataagacacaacctttaaaccctattggtt

SEQ ID NO: 472 - DNA, 461 bp, Artificial
  Mutation introduced by TALE nuclease pair POT32_T02 within a POT32 allele
gcaagcttgtgcaatagtagtagtacatctctcaaaactccttttacttcttcctccacttctttacttccactcctaagccctctcaacttttcatccatggaaaacgtaaccaaatgttcaaagtttcatgcaaggttaccaataataacggtgaccaaaaccaaaacgttgaaacgaattctgttgatcgaagaaatgttcttcttggcttaggtggtctttatggtgttgctaatgctataccattagctgcatccgctgctccagctccacctcctgatctctcgtcttgtagtatagccaggattaacgaaaatcaggtggtgccgtacagttgttgcgcgcctaagcctgatgatatggagaaagttccgtattacaagttcccttctatgactaagctcgtctgcgtcctgctcatgaagctaatgaggagtatattgccaagtacaattgcg

SEQ ID NO: 473 - DNA, 500 bp, Artificial
  Mutation introduced by TALE nuclease pair POT32_T02 within a POT32 allele
gcaagcttgtgcaatagtagtagtacatctctcaaaactccttttacttcttcctccacttctttatcttccactcctaagccctctcaacttttcatccatggaaaacgtaaccaaatgttcaaagtttcatgcaaggttaccaataataacggtgaccaaaaccaaaacgttgaaacgaattctgttgatcgaagaaatgttcttcttggcttaggtggtctttatggtgttgctaatgctataccattagctgcatccgctgctccagctccacctcctgatctctcgtcttgtagtatagccaggattaacgaaaatcaggtggtgccgtacagttgttgcgcgcctaagcctgatgatatggagaaagttccgtattacaagttcccttctatgactaagctccgtcagcctgctcatgaagctaatgaggagtatattgccaagtacaatttggcggttagcaagatgagggatcttgataagacacaaccttt

SEQ ID NO: 474 - DNA, 507 bp, Artificial
  Mutation introduced by TALE nuclease pair POT32_T02 within a POT32 allele
gcaagcttgtgcaatagtagtagtacatctctcaaaactccttttacttcttcctccacttctttatctcccactcctaagcccctctcaacttttcatccatggaaaacgtaaccaaatgttcaaagtttcatgcaaggttatcaataataacggtgaccaaaacgttgaaacgaattctgttgatcgaagaaatgttcttcttggcttaggtggtctttatggtgttgctaatgctataccattagctgcatccgctgctccaactccacctcctgatctctcgtcttgtagtatagccaggattaacgaaatcaggtggtgccgtacagttgttgcgcgcctaagcctgatgatatggagaaagttccgtattacaagttcccttctatgactaagctccgcagcctgctcatgaagctaatgaggagtatattgccaagtacaatctggcgattagtcgaatgagagatcttgataagacacaacctttaaaccctattggtt

SEQ ID NO: 475 - DNA, 512 bp, Artificial
  Mutation introduced by TALE nuclease pair POT32_T02 within a POT32 allele
gcaagcttgtgcaatagtagtagtacatctctcaaaactccttttacttcttcctccacttctttatcttccactcctaagcccctctcaacttttcatccatggaaaacgtaaccaaatgttcaaagtttcatgcaaggttaccaataataacggtgaccaaaaccaaaacgttgaaacaaattctgttgatcgaagaaatgttcttcttggcttaggtggtctttatggtgttgctaatgctataccattagctgcatccgctgctccagctccacctcctgatctctcgtcttgtagtatagccaggattaacgaaaatcaggtggtgccgtacagttgttgcgcgcctaagcctgatgatatggagaaagttccgtattacaagttcccttctatgactaagcttcagcctgctcatgaagctaatgaggagtatattgccaagtacaatctggcgattagtcgaatgagagatcttgataagacacaacctttaaaccctattggtt

SEQ ID NO: 476 - DNA, 516 bp, Artificial
  Mutation introduced by TALE nuclease pair POT32_T02 within a POT32 allele
gcaagcttgtgcaatagtagtagtacatctctcaaaactccttttacttcttcctccacttctttaacttccactcctaagcccctctcaacttttcatccatggaaaacgtaaccaaatgttcaaagtttcatgcaaggttaccaataataacggtggccaaaaccaaaacgttgaaacaaattctgttgatcgaagaaatgttcttcttggcttaggtggtctttatggtgttgctaatgctataccattagctgcatccgctgctccagctccacctcatgatctctcgtcttgtagtatagccaggattaacgaaaatcaggtggtgccgtacagttgttgcgcgcctaagcctgatgatatggagaaagttccgtattacaagttcccttctatgactaagctccgtcagcctgctcatgaagctaatgaggagtatattgccaagtacaatttggcggttagcaagatgaggggatcttgataagacacaacctttaaaccctattggtt

SEQ ID NO: 477 - DNA, 484 bp, Artificial
  Mutation introduced by TALE nuclease pair POT32_T02 within a POT32 allele
gcaagcttgtgcaatagtagtagtacatctctcaaaactccttttacttcttcctccacttctttaacttccactcctaagcccctctcaacttttcatccatggaaaacgtaaccaaatgttcaaagtttcatgcaaggttaccaataataacggtgaccaaaaccaaaacgttgaaacgaattctgttgatcgaagaaatgttcttcttggcttaggtggtctttatggtgttgctaatgctataccattagctgcatccgctgctccagctccacctcctgatctctcgtcttgtagtatagccaggattaacgaaaatcaggtggtgccgtacagttgttgcgcgcctaagcctgatgatatggagaaagttccgtattacaagttcccttctatgactaagctctgctcatgaagctaatgaggagtatatttgccaaagtacaatttggcggttagcaagatgaggggatcttgataa

SEQ ID NO: 478 - DNA, 514 bp, Artificial
  Mutation introduced by TALE nuclease pair POT32_T02 within a POT32 allele
gcaagcttgtgcaatagtgtagtacatctctcaaaactccttttacttcttcctccacttctttaacttccactcctaaacccctctcaacttttcatccatggaaaacgtaaccaaatgttcaaagtttcatgcaaggttaccaataataacggtgaccaaaaccaaaacgttgaaacgaattctgttgatcgaagaaatgttcttcttggcttaggtggtctttatggtgttgctaatgctataccattagctgcatccgctactccatctccacctcctgatctctcgtcttgtagtatagccaggattaacgaaactcatgtggtgccgtacagttgttgcgcgcctaagcctgatgatatggagaaagttccgtattacaagttcccttctatgactaagctccttctgcctgcctcatgaagctaatgaggagtatattgccaagtacaatttgggcggttagcaagatgaggggtcttgataagacacaacctttaaaccctattgg

SEQ ID NO: 479 - DNA, 463 bp, Artificial
  Mutation introduced by TALE nuclease pair POT32_T02 within a POT32 allele
gcaagcttgtgcaatagtagtagtacatctctcaaaactccttttacttcttcctccacttctttaacttccactcctaaaccctctcaacttttcatccatggaaaacgtaaccaaatgttcaaagtttcatgcaaggttaccaataataacggtgaccaaaaccaaaacgttgaaacaaattctgttgatcgaagaaatgttcttcttggcttaggtggtctttatggtgttgctaatgctataccattagctgcatccgctactccatgctccacctcctgatctctcgtcttgtagtatagccaggattaacgaaaatcaggtggtgccgtacagttgttgcgcgcctaagcctgatgatatggagaaagttccgtattacaagttcccttctatgactaagctcctcagcctgctcatgaagctaatgaggagtatattgccaagtacaattgcgttg

SEQ ID NO: 480 - DNA, 512 bp, Artificial
  Mutation introduced by TALE nuclease pair POT32_T02 within a POT32 allele
gcaagcttgttcaatagtagtagtacatctctcaaaactccttttacttcttcctccacttctttaacttccactcctaagcccctctcaacttttcatccatggaaaacgtaaccaaatgttcaaagtttcatgcaaggttaccaataataacggtgaccaaaaccaaaacgttgaaacgaattctgttgatcgaagaaatgttcttcttggcttaggtggtctttatggtgttgctaatgctataccattagctgcatccgctgctccagctccacctcctgatctctcgtcttgtagtatagccaggattaacgaaaatcaggtggtgccgtacagttgttgcgcgcctaagcctgatgatatggagaaagttccgtattacaagttcccttctatgactaagctcagcctgctcatgaagctaatgaggagtatattgccaagtacaatttggcggttagcaagatgaggggatcttgataagacacaacctttaaaccctattggtt

SEQ ID NO: 481 - DNA, 490 bp, Artificial
  Mutation introduced by TALE nuclease pair POT32_T02 within a POT32 allele
gcaagcttgtgcaatagtagtagtacatctctcaaaactccttttacttcttcctccacttctttatcttccactcctaagccctctcaacttttcatccatggaaaacgtaaccaaatgttcaaagtttcatgcaaggttaccaataataacggtgaccaaaaccaaaacgttgaaacaaattctgttgatcgaagaaatgttcttcttggcttaggtggtctttatggtgttgctaatgctataccattagctgcatccgctgctccagctccacctcctgatctctcgtcttgtagtatagccaggattaacgaaaatcaggtggtgccgtacagttgttgcgcgcctaagcctgatgatatggagaaagttccgtattacaagttcccttctatgactaagcttaatgaggagtatattgccaagtacaatttggcggttagcaagatgaggggatcttgataagacacaacctttaaaccctatt

SEQ ID NO: 482 - DNA, 447 bp, Artificial
  Mutation introduced by TALE nuclease pair POT32_T02 within a POT32 allele
gcaagcttgtgcaatagtagtagtacatctctcaaaactccttttacttcttcctccacttctttatcttccactcctaagccctctcaacttttcatccatggaaaacgtaaccaaatgttcaaagtttcatgcaaggttaccaataataacggtgaccaaaaccaaaacgttgaaacgaattctgttgatcgaagaaatgttcttcttggcttaggtggtctttatggtgttgctaatgctataccattagctgcatccgctgctccagctccacctcctgatctctcgtcttgtagtatagccaggattaacgaaaatcaggtggtgccgtacagttgttgcgcgcctaagcctgatgatatggagaaagttccgtattacaagttcccttctatgactaagctccgtcagcctgctcatgaagctaatgaggagtatattgcc

SEQ ID NO: 483 - DNA, 508 bp, Artificial
  Mutation introduced by TALE nuclease pair POT32_T02 within a POT32 allele
gcaagcttgtgcaatagtagtagtacatctctcaaaatctccttttacttcttcctccacttctttatcttccactcctaagccctctcaacttttcatccatggaaaacgtaaccaaatgttcaaagtttcatgcaaggttatcaataataacggtgaccaaaacgttgaaacgaattctgttgatcgaagaaaatgttcttcttggcttaggtggtctttatggtgttgctaatgctataccattagctgcatccgctgctccaactccacctcctgatctctcgtcttgtagtatagccaggattaacgaaaatcaggtggtgccgtacagttgttgcgcgcctaagcctgatgatatggagaaagttccgtattacaagttcccttctatgactaagctccgagcctgctcatgaagctaatgaggagtatattgccaagtacaatctggcgattagtcgaatgagagatcttgataagacacaacctttaaaccctattggtt

SEQ ID NO: 484 - DNA, 515 bp, Artificial
  Mutation introduced by TALE nuclease pair POT32_T02 within a POT32 allele
gcaagcttgtgcaatagtagtagtacatctctcaaaactccttttacttcttcctccacttctttatcttccactcctaagccctctcaacttttcatccatggaaaacgtaaccaaatgttcaaagtttcatgcaaggttaccaataataacggtgaccaaaaccaaaacgttgaaacaaaattctgttgatcgaagaaatgttcttcttggcttaggtggtctttatggtgttgctaatgctataccattagctgcatccgctgctccagctccacctcctgatctctcgtcttgtagtatagccaggattaacgaaaatcaggtggtgccgtacagttgttgcgcgcctaagcctgatgatatggagaaagttccgtattacaagttcccttctatgactaagctccgtcagcctgctcatgaagctaatgaggagtatattgccaagtacaatttggcggttagcaagatgagggatcttgataagacacaacctttaaaccctattggtt

SEQ ID NO: 485 - DNA, 480 bp, Artificial
  Mutation introduced by TALE nuclease pair POT32_T02 within a POT32 allele
gcaagcttgtgcaatagtagtagtacatctctcaaaactccttttacttcttcctccacttctttaacttccactcctaagcccctctcaacttttcatccatggaaaacgtaaccaaatgttcaaagtttcatgcaaggttaccaataataacggtgaccaaaaccaaaacgttgaaacgaattctgttgatcgaagaaatgttcttcttggcttaggtggtctttatggtgttgctaatgctataccattagctgcatccgctgctccagctccacctcctgatctctcgtcttgtagtatagccaggattaacgaaaatcaggtggtgccgtacagttgttgcgcgcctaagcctgatgatatggagaaagttccgtattacaagttcccttctatgactaagctagctaatgaggagtatattgccaagtacaatttggcggttagcaagatgagggatcttgataagacacaacc

SEQ ID NO: 486 - DNA, 514 bp, Artificial
  Mutation introduced by TALE nuclease pair POT32_T02 within a POT32 allele
gcaagcttgtgcaatagttgtagtacatctctcaaaactccttttacttcttcctccacttctttaacttccactcctaaaccctctcaacttttcatccatggaaaacgtaaccaaatgttcaaagtttcatgcaaggttaccaataataacgtgaccaaaaccaaaacgttgaaacgaattctgttgatcgaagaaatgttcttcttggcttaggtggtctttatggtgttgctaatgctataccattagctgcatccgctgctccagctccacctcctgatctctcgtcttgtagtatagccaggattaacgaaaatcaggtggtgccgtacagttgttgcgcgcctaagcctgatgatatggagaaagttccgtattacaagttcccttctatgactaagctccggtcagcctgctcatgaagctaatgaggagtatattgccaagtacaatctggcgattagtcgaatgaaagatcttgataagacacaacctttaaaccctattggtt

SEQ ID NO: 487 - DNA, 487 bp, Artificial
  Mutation introduced by TALE nuclease pair POT32_T02 within a POT32 allele
gcaagcttgtgcaatagtagtagtacatctctcaaaactccttttacttcttcctccacttctttaacttccactcctaagcccctctcaacttttcatccatggaaaacgtaaccaaatgttcaaagtttcatgcaaggttaccaataataacggtgaccaaaaccaaaacgttgaaacgaattctgttgatcgaagaaatgttcttcttggcttaggtggtctttatggtgttgctaatgctataccattagctgcatccgctgctccagctccacctcctgatctctcgtcttgtagtatagccaggattaacgaaaatcaggtggtgccgtacagttgttgcgcgcctaagcctgatgatatggagaaagttccgtattacaagttcccttctatgactaagctccgtctgctcctgcatgaagctaatgaggagtatattgccaagtacaatctggcgattagtcgaatgaaagatcttgat

SEQ ID NO: 488 - DNA, 472 bp, Artificial
  Mutation introduced by TALE nuclease pair POT32_T02 within a POT32 allele
gcaagcttgtgcaatagtagtagtacatctctcaaaactccttttacttcttcctccacttctttatcttccactcctaagcccctctcaacttttcatccatggaaaacgtaaccaaatgttcaaagtttcatgcaaggttaccaataataacggtgaccaaaaccaaaacgttgaaacgaattctgttgatcgaagaaatgttcttcttggcttaggtggtctttatggtgttgctaatgctataccattagctgcatccgctgctccagctccacctcctgatctctcgtcttgtagtatagccaggattaacgaaaatcaggtggtgccgtacagttgttgcgcgcctaagcctgatgatatggagaaagttccgtattacaagttcccttctatgactaagctccgtctgctcctgactctcgagtaatgaggagtatattgccaagtacaatttggcggttagcaa

SEQ ID NO: 489 - DNA, 514 bp, Artificial
  Mutation introduced by TALE nuclease pair POT32_T02 within a POT32 allele
gcaagcttgtgcaatagttgtagtacatctctcaaaactccttttacttcttcctccacttctttaacttccactcctaaaccctctcaacttttcatccatggaaaacgtaaccaaatgttcaaagtttcatgcaaggttaccaataataacggtgaccaaaaccaaaacgttgaaacgaattctgttgatcgaagaaatgttcttcttggcttaggtggtctttatggtgttgctaatgctataccattagctgcatccgctactccatctccacctcctgatctctcgtcttgtagtatagccaggattaacgaaactcatgtggtgccgtacagttgttgcgcgcctaagcctgatgatatggagaaagttccgtattacaagttcccttctatgactaagctccgtcagcctgctcatgaagctaatgaggagtatattgccaagtacaatttggcggttagcaagatgagggatcttgataagacacaacctttaaaccctattggtt

SEQ ID NO: 490 - DNA, 489 bp, Artificial
  Mutation introduced by TALE nuclease pair POT32_T02 within a POT32 allele
gcaagcttgtgcaatagttgtagtacatccctcaaaactccttttacttcttcctccacttctttaacttccactcctaaaccctctcaacttttcatccatggaaaacgtaaccaaatgttcaaagtttcatgcatggttaccaataataacggtgaccaaaaccaaaacgttgaaacgaattctgttgatcgaagaaatgttcttcttggcttaggtggtctttatggtgttgctaatgctataccattagctgcatccgctactccatctccacctcctgatctctcgtcttgtagtatagccaggattaacgaaactcatgtggtgccgtacagttgttgcgcgcctaagcctgatgatatggagaaagttccgtattacaagttcccttctatgactaatcagcctgctcatgaagctaatgaggagtatattgccaagtacaatttggcggttagcaagatgagggatcttgataagacacaa

SEQ ID NO: 491 - DNA, 447 bp, Artificial
  Mutation introduced by TALE nuclease pair POT32_T02 within a POT32 allele
gcaagcttgtgcaatagtagtagtacatctctcaaaactccttttacttcttcctccacttctttatcttccactcctaagcccctctcaacttttcatccatggaaaacgtaaccaaatgttcaaagtttcatgcaaggttaccaataataacggtgccaaaaccaaaacgttgaaacaaaattctgttgatcgaagaaatgttcttcttggcttaggtggtctttatggtgttgctaatgctataccattagctgcatccgctgctccagctccacctcctgatctctcgtcttgtagtatagccaggattaacgaaaatcaggtggtgccgtacagttgttgcgcgcctaagcctgatgatatggagaaagttccgtattacaagttcccttctatgactcgtcagcctgctcatgaagctaatgaggagtatattgccaagta

SEQ ID NO: 492 - DNA, 484 bp, Artificial
  Mutation introduced by TALE nuclease pair POT32_T02 within a POT32 allele
gcaagcttgtgcaatagtagtagtacatctctcaaaactccttttacttcttcctccacttctttaacttccactcctaagccctctcaacttttcatccatggaaaacgtaaccaaatgttcaaagtttcatgcaaggttaccaataataacggtgaccaaaaccaaaacgttgaaacgaattctgttgatcgaagaaatgttcttcttggcttaggtggtctttatggtgttgctaatgctataccattagctgcatccgctgctccagctccacctcctgatctctcgtcttgtagtatagccaggattaacgaaaatcaggtggtgccgtacatgttgtgcgccgactcatgcctgatgatatggagaaagttccgtattacaagttcccttctatgactaagctccgtcgtgcagcctgctcatgaagctaatgaggagtatattgccaagtacaatctggcgattagtcgaatgaaag

SEQ ID NO: 493 - DNA, 511 bp, Artificial
  Mutation introduced by TALE nuclease pair POT32_T02 within a POT32 allele
gcaagcttgtgcaatagtagtagtacatctctcaaaactccttttacttcttcctccacttctttatcttccactcctaagcccctctcaacttttcatccatggaaaacgtaaccaaatgttcaaagtttcatgcaaggttatcaataataacggtgaccaaaacgttgaaacgaattctgttgatcgaagaaatgttcttcttggcttaggtggtctttatggtgttgctaatgctataccattagctgcatccgctgctccaactccacctcctgatctctcgtcttgtagtatagccaggattaacgaagatcaggtggtgccgtacagttgttgcgcgcctaagcctgatgatatggagaaagttccgtattacaagttcccttctatgactaagctccgtgtcagcctgctcatgaagctaatgaggagtatattgccaagtacaatctggcgattagtcgaatgagagatcttgataagacacaacctttaaaccctattggtt

SEQ ID NO: 494 - DNA, 551 bp, Artificial
  Mutation introduced by TALE nuclease pair POT32_T02 within a POT32 allele
gcaagcttgtgcaatagtagtagtacatctctcaaaactccttttacttcttcctccacttctttaacttccactcctaagccctctcaacttttcatccatggaaaacgtaaccaaatgttcaaagtttcatgcaaggttaccaataataacggtgaccaaaaccaaaacgttgaaacgaattctgttgatcgaagaaatgttcttcttggcttaggtggtctttatggtgttgctaatgctataccattagctgcatccgctgctccagctccacctcctgatctctcgtcttgtagtatagccaggattaacgaaaatcaggtggtgccgtacagttgttgcgcgcctaagcctgatgatatggagaaagttccgtattacaagttcccttctatgactaagctccgcgggtcaagccgtgggcctggcacagcaccggcaacagccgctgcagcctgctcatgaagctaatgaggagtatattgccaagtacaatttggcggttagcaagatgagggatcttgataagacacaacctttaaacccta

SEQ ID NO: 495 - DNA, 475 bp, Artificial
  Mutation introduced by TALE nuclease pair POT32_T02 within a POT32 allele
gcaagcttgtgcaatagtagtagtacatctctcaaaactccttttacttcttcctccacttctttatcttccactcctaagccctctcaacttttcatccatggaaaacgtaaccaaatgttcaaagtttcatgcaaggttaccaataataacggtgaccaaaaccaaaacgttgaaacgaattctgttgatcgaagaaatgttcttcttggcttaggtggtctttatggtgttgctaatgctataccattagctgcatccgctgctccagctccacctcctgatctctcgtcttgtagtatagcccaggatttaacgaaaatcaggtggtgccgtacagttgttgcgcgcctaagcctgatgatatggagaaagttccgtattacaagttcccttctatgactaagctcccagcctgctcatgaagctaatgaggagtatattgccaagtacaatttggcggttagcaagatga

SEQ ID NO: 496 - DNA, 486 bp, Artificial
  Mutation introduced by TALE nuclease pair POT32_T02 within a POT32 allele
gcaagcttgtgcattagtagtagtacatctctcaaaactccttttacttcttcctccacttctttatcttccactcctaagcccctctcaacttttcatccatggaaaacgtaaccaaatgttcaaagtttcatgcaaggttatcaataataacggtgaccaaaacgttgaaacgaattctgttgatcgaagaaatgttcttcttggcttaggtggtctttatggtgttgctaatgctataccattagctgcatccgctgctccaactccacctcctgatctctcgtcttgtagtatagccaggattaacgaaaatcaggtggtgccgtacagttgttgcgcgcctaagcctgatgatatggagaaagttccgtattacaagttcccttcagcctgctcatgaagctaatgaggagtatattgccaagtacaatctggcgattagtcgaatgagagatcttgataagacacaacctttaaacccta

SEQ ID NO: 497 - DNA, 469 bp, Artificial
  Mutation introduced by TALE nuclease pair POT32_T02 within a POT32 allele
gcaagcttgtgcaatagtagtagtacatctctcaaaactccttttacttcttcctccacttctttaacttccactcctaagccctctcaacttttcatccatggaaaacgtaaccaaatgttcaaagtttcatgcaaggttaccaataataacggtgaccaaaaccaaaacgttgaaacaaattctgttgatcgaagaaatgttcttcttggcttaggtggtctttatggtgttgctaatgctataccattagctgcatccgctgctccagctccacctcctgatctctcgtcttgtagtatagccaggattaacgaaaatcaggtggtgccgtacagttgttgcgcgcctaagcctgatgatatggagaaagttccgtattacaagttcccttctatgactaagctccgtcgtgccatcctgctcatgaagctaatgaggagtatattgccaagtacaattgcgttgc

SEQ ID NO: 498 - DNA, 450 bp, Artificial
  Mutation introduced by TALE nuclease pair POT32_T02 within a POT32 allele
gcaagcttgtgcaatagtagtagtacatctctcaaaactccttttacttcttcctccacttctttatcttccactcctaagccctctcaacttttcatccatggaaaacgtaaccaaatgttcaaagtttcatgcaaggttaccaataataacggtgaccaaaaccaaaacgttgaaacaaaattctgttgatcgaagaaatgttcttcttggcttaggtggtctttatggtgttgctaatgctataccattagctgcatccgctgctccagctccacctcctgatctctcgtcttgtagtatagccaggattaacgaaaatcaggtggtgccgtacagttgttgcgcgcctaagcctgatgatatggagaaagttccgtattacaagttcccttctatgactaagctcagctgctcatgagctaatgaggagtatattgccaagtacaa

SEQ ID NO: 499 - DNA, 511 bp, Artificial
  Mutation introduced by TALE nuclease pair POT32_T02 within a POT32 allele
gcaagcttgtgcaatagtagtagtacatctctcaaaactccttttacttcttcctccacttctttaacttccactcctaaacccctctcaacttttcatccatggaaaacgtaaccaaatgttcaaagtttcatgcatggttccaataataacggtgccaaaccaaaacgttgaaacgaattctgttgatcgaagaaatgttcttcttggcttaggtggtctttatggtgttgctaatgctataccattagctgcatccgctactccatctccacctcctgatctctcgtcttgtagtatagccaggattaacgaaactcatgtggtgccgtacagttgttgcgcgcctaagcctgatgatatggagaaagttccgtattacaagttcccttctatgactaagctctgtcagcctgctcatgaagctaatgaggagtatattgccaagtacaattttgggcggttagcaagatgaggggtcttgataagacacaaccttttaaaccctatt

SEQ ID NO: 500 - DNA, 502 bp, Artificial
  Mutation introduced by TALE nuclease pair POT32_T02 within a POT32 allele
gcaagcttgtgcaatagtagtagtacatctctcaaaactccttttacttcttcctccacttctttatcttccactcctaagcccctctcaacttttcatccatggaaaacgtaaccaaatgttcaaagtttcatgcaaggttatcaataataacggtgaccaaaacgttgaaacgaattctgttgatcgaagaaatgttcttcttggcttaggtggtctttatggtgttgctaatgctataccattagctgcatccgctgctccaactccacctcctgatctctcgtcttgtagtatagccaggattaacgaaaatcaggtggtgccgtacagttgttgcgcgcctaagcctgatgatatggagaaagttccgtattacaagttcccttctatgactaagctccgtcagcctgctcatgaagctaatgaggagtatattgccaagtacaatttggcggttagcaagatgagggatcttgataagacacaacctttaaatccc

SEQ ID NO: 501 - DNA, 513 bp, Artificial
  Mutation introduced by TALE nuclease pair POT32_T02 within a POT32 allele
gcaagcttgtgcaatagtagtagtacatctctcaaaactccttttacttcttcctccacttctttaacttccactcctaaaccctctcaacttttcatccatggaaaacgtaaccaaatgttcaaagtttcatgcaaggttaccaataataacggtgaccaaaaccaaaacgttgaaacgaattctgttgatcgaagaaatgttcttcttggcttaggtggtctttatggtgttgctaatgctataccattagctgcatccgctactccatctccacctcctgatctctcgtcttgtagtatagccaggattaacgaaaactcagtggtgccgtacagttgttgcgcgcctaagcctgatgatatggagaaagttccgtattacaagttcccttctatgactaagcttctcagcctgctcatgaagctaatgaggagtatattgccaagtacaatctggcgattagtcgaatgagagatcttgataagacacaacctttaaaccctattggtt

SEQ ID NO: 502 - DNA, 503 bp, Artificial
  Mutation introduced by TALE nuclease pair POT32_T02 within a POT32 allele
gcaagcttgtgcaatagtagtagtacatctctcaaaactccttttacttcttcctccacttctttatcttccactcctaagccctctcaacttttcatccatggaaaacgtaaccaaatgttcaaagtttcatgcaaggttaccaataataacggtgaccaaaaccaaaacgttgaaacgaattctgttgatcgaagaaatgttcttcttggcttaggtggtctttatggtgttgctaatgctataccattagctgcatccgctgctccagctccacctcctgatctctcgtcttgtagtatagccaggattaacgaaaatcaggtggtgccgtacagttgttgcgcgcctaagcctgatgatatggagaaagttccgtattacaagttcccttctatgactaagtcagcctgctcatgaagctaatgaggagtatattgccaagtacaatttggcggttagcaagatgagggatcttgataagacacaacctttaaacccta

SEQ ID NO: 503 - DNA, 503 bp, Artificial
  Mutation introduced by TALE nuclease pair POT32_T02 within a POT32 allele
gcaagcttgtgcaatagtagtagtacatctctcaaaactccttttacttcttcctccacttctttaacttccactcctaagccctctcaacttttcatccatggaaaacgtaaccaaatgttcaaagtttcatgcaaggttaccaataataacggtgaccaaaaccaaaacgttgaaacgaattctgttgatcgaagaaatgttcttcttggcttaggtggtctttatggtgttgctaatgctataccattagctgcatccgctgctccagctccacctcctgatctctcgtcttgtagtatagccaggattaacgaaaatcaggtggtgccgtacagttgttgcgcgcctaagcctgatgatatggagaaagttccgtattacaagttcccttctatgactaagctccgttgctcatgaagctaatgaggagtatattgccaagtacaatctggcgattagtcgaatgaaagatcttgataagacacaacctttaaacccta

SEQ ID NO: 504 - DNA, 487 bp, Artificial
  Mutation introduced by TALE nuclease pair POT32_T02 within a POT32 allele
gcaagcttgtgcaatagtagtagtacatctctcaaaactccttttacttcttcctccacttctttaacttccactcctaagccctctcaacttttcatccatggaaaacgtaaccaaatgttcaaagtttcatgcaaggttaccaataataacggtgaccaaaaccaaaacgttgaaacgaattctgttgatcgaagaaatgttcttcttggcttaggtggtctttatggtgttgctaatgctataccattagctgcatccgctgctccagctccacctcctgatctctcgtcttgtagtatagccaggattaacgaaaatcaggtggtgccgtacagttgttgcgcgcctaagcctgatgatatggagaaagttccgtattacaagttcccttctatgactaagctctgctcatgaagctaatgaggagtatattgccaagtacaatttggcggttagcaagatgagggatcttgataagacacaa

SEQ ID NO: 505 - DNA, 491 bp, Artificial
  Mutation introduced by TALE nuclease pair POT32_T02 within a POT32 allele
gcaagcttgtgcaatagtagtagtacatctctcaaaactccttttacttcttcctccacttctttatcttccactcctaagccctctcaacttttcatccatggaaaacgtaaccaaatgttcaaagtttcatgcaaggttaccaataataacggtgaccaaaaccaaaacgttgaaacaaattctgttgatcgaagaaatgttcttcttggcttaggtggtctttatggtgttgctaatgctataccattagctgcatccgctgctccagctccacctcctgatctctcgtcttgtagtatagccaggattaacgaaaatcaggtggtgccgtacagttgttgcgcgcctaagcctgatgatatggagaaagttccgtattacaagttcccttctatgactaaggtcagcctgctcatgaagctaatgaggagtatattgccaagtacaatttggcggttagcaagatgagggatcttgataagacacaa

SEQ ID NO: 506 - DNA, 478 bp, Artificial
  Mutation introduced by TALE nuclease pair POT32_T02 within a POT32 allele
gcaagcttgtgcaatagtagtagtacatctctcaaaactccttttacttcttcctccacttctttaacttccactcctaagcccctctcaacttttcatccatggaaaacgtaaccaaatgttcaaagtttcatgcaaggttaccaataataacggtgaccaaaaccaaaagcgttgaaacgaattctgttgatcgaagaaatgttcttcttggcttaggtggtctttatggtgttgctaatgctataccattagctgcatccgctgctccagctccacctcctgatctctcgtcttgtagtatagccaggattaacgaaaatcaggtggtgccgtacagttgttgcgcgcctaagcctgatgatatggagaaaggttccgtattacaagttcccttctatgactaagctccgtcagcctgctcatgaagctaatgaggagtatattgccaagtacaatttggcggttagcaagatga

SEQ ID NO: 507 - DNA, 430 bp, Artificial
  Mutation introduced by TALE nuclease pair POT32_T02 within a POT32 allele
gcaagcttgtgcaatagtagtagtacatctctcaaaactccttttacttcttcctccacttctttatcttccactcctaagccctctcaacttttcatccatggaaaacgtaaccaaatgttcaaagtttcatgcaaggttaccaataataacggtgaccaaaaccaaaacgttgaaacaaaattctgttgatcgaagaaatgttcttcttggcttaggtggtctttatggtgttgctaatgctataccattagctgcatccgctgctccagctccacctcctgatctctcgtcttgtagtatagccaggattaacgaaaatcaggtggtgccgtacagttgttgcgcgcctaagcctgatgatatggagaaagttccgtattacaagttcccttctatgactaaggtcagcctgctcatgaagctaatg

SEQ ID NO: 508 - DNA, 507 bp, Artificial
  Mutation introduced by TALE nuclease pair POT32_T02 within a POT32 allele
gcaagcttgtgcaatagtagtagtacatctctcaaaactccttttacttcttcctccacttctttatcttccactcctaagccctctcaacttttcatccatggaaaacgtaaccaaatgttcaaagtttcatgcaaggttatcaataataacggtgaccaaaacgttgaaacgaattctgttgatcgaagaaatgttcttcttggcttaggtggtctttatggtgttgctaatgctataccattagctgcatccgctgctccaactccacctcctgatctctcgtcttgtagtatagccaggattaacgaaaatcaggtggtgccgtacagttgttgcgcgcctaagcctgatgatatggagaaagttccgtattacaagttcccttctatgactaagctcctcagcctgctcatgaagctaatgaggagtatattgccaagtacaatttggcggttagcaagatgagggatcttgataagacacaacctttaaaccctattggtt

SEQ ID NO: 509 - DNA, 491 bp, Artificial
  Mutation introduced by TALE nuclease pair POT32_T02 within a POT32 allele
gcaagcttgtgcaatagtagtagtacatctctcaaaactccttttacttcttcctccacttctttatcttccactcctaagccctctcaacttttcatccatggaaaacgtaaccaaatgttcaaagtttcatgcaaggttaccaataataacggtgaccaaaaccaaaacgttgaaacaaaattctgttgatcgaagaaatgttcttcttggcttaggtggtctttatggtgttgctaatgctataccattagctgcatccgctgctccagctccacctcctgatctctcgtcttgtagtatagccaggattaacgaaaatcaggtggtgccgtacagttgttgcgcgcctaagcctgatgatatggagaaagttccgtattacaagttcccttctatgactaagcttaatgaggagtatattgccaagtacaatttggcggttagcaagatgaggggatcttgataagacacaacctttaaaccctatt

SEQ ID NO: 510 - DNA, 464 bp, Artificial
  Mutation introduced by TALE nuclease pair POT32_T02 within a POT32 allele
  misc_feature (274): n is a or c or t or g
gcaagcttgtgcaatagtagtagtacatctctcaaaactccttttacttcttcctccacttctttatcttccactcctaaaccgcctctcaacttttcatccatggaaaacgtaaccaaatgttcaaagtttcatgcaaggttaccaataataacggtgaccaaaaccaaaacgttgaaacaaattctgttgatcgaagaaatgttcttcttggcttaggtggtctttatggtgttgctaatgctataccattagctgcatccgctactccatntccacctcctgatctctcgtcttgtagtatagccaggattaacgaaaatcaggtggtgccgtacagttgttgcgcgcctaagcctgatgatatggagaaagttccgtattacaagttcccttctatgactaagctccgtcagcctgctcatgaagctaatgaggagtatattgccaagtacaattgcgtg

SEQ ID NO: 511 - DNA, 494 bp, Artificial
  Mutation introduced by TALE nuclease pair POT32_T02 within a POT32 allele
gcaagcttgtgcaatagtagtagtacatctctcaaaactccttttacttcttcctccacttctttatcttccactcctaagcccctctcaacttttcatccatggaaaacgtaaccaaatgttcaaagtttcatgcaaggttaccaataataacggtgaccaaaaccaaaacgttgaaacgaattctgttgatcgaagaaatgttcttcttggcttaggtggtctttatggtgttgctaatgctataccattagctgcatccgctactccatctccacctcctgatctctcgtcttgtagtatagccaggattaacgaaactcatgtggtgccgtacagttgttgcgcgcctaagcctgatgatatggagaaagttccgtattacaagttcccttctatgactatgtcagcctgctcatgaagctaatgaggagtatattgccaagtacaatctggcgattagtcgaatgaaagatcttgataagacacaaccc

SEQ ID NO: 512 - DNA, 490 bp, Artificial
  Mutation introduced by TALE nuclease pair POT32_T02 within a POT32 allele
gcaagcttgtgcaatagttgtagtacatccctcaaaactccttttacttcttcctccacttctttaacttccactcctaaaccctctcaacttttcatccatggaaaacgtaaccaaatgttcaaagtttcatgcatggttaccaataataacggtgaccaaaaccaaaacgttgaaacgaattctgttgatcgaagaaatgttcttcttggcttaggtggtctttatggtgttgctaatgctataccattagctgcatccgctactccatctccacctcctgatctctcgtcttgtagtatagccaggattaacgaaactcatgtggtgccgtacagttgttgcgcgcctaagccagatgatatggagaaagttccgtattacaagttcccttctatgactaagctccgtaatgaggagtatattgccaagtacaatctggcgattagtcgaatgagagatcttgataagacacaacctttaaacccta

SEQ ID NO: 513 - DNA, 479 bp, Artificial
  Mutation introduced by TALE nuclease pair POT32_T02 within a POT32 allele
gcaagcttgtgcaatagtagtagtacatctctcaaaactccttttacttcttcctccacttctttatcttccactcctaagccctctcaacttttcatccatggaaaacgtaaccaaatgttcaaagtttcatgcaaggttatcaataataacggtgccaaaacgttgaaacgaattctgttgatcgaagaaaatgttcttcttggcttaggtggtctttatggtgttgctaatgctataccattagctgcatccgctgctccagctccacctcctgatctctcgtcttgtagtatagccaggattaacgaaaatcaggtggtgccgtacagttgttgcgcgcctaagcctgatgatatggagaaagttccgtattacaagttcccttctatgactaagctccgtgagcctgctcatgaagctaatgaggagtatattgccaagtacaatctggcgattagtcgaataaagatcttgat

SEQ ID NO: 514 - DNA, 476 bp, Artificial
  Mutation introduced by TALE nuclease pair POT32_T02 within a POT32 allele
gcaagcttgtgcaatagtagtagtacatctctcaaaactccttttacttcttcctccacttctttatcttccactcctaagcccctctcaacttttcatccatggaaaacgtaaccaaatgttcaaagtttcatgcaaggttatcaataataacggtgaccaaaacgttgaaacgaattctgttgatcgaagaaatgttcttcttggcttaggtggtctttatggtgttgctaatgctataccattagctgcatccgctgctccaactccacctcctgatctctcgtcttgtagtatagccaggattaacgaaaatcaggtggtgccgtacagttgttgcgcgcctaagcctgatgatatggagaaagttccgtattacaagttcccttctatgactagctcgtctgcgcctgctcatgaaagctaaatgaggagtatattgccaagtacaatctggcgattagtcgaatgaagag

SEQ ID NO: 515 - DNA, 497 bp, Artificial
  Mutation introduced by TALE nuclease pair POT32_T02 within a POT32 allele
gcaagcttgtgcaatagtagtagtacatctctcaaaactccttttacttcttcctccacttctttacttccactcctaagccctctcaacttttcatccatggaaaacgtaaccaaatgttcaaagtttcatgcaaggttaccaataataacggtgaccaaaaccaaaacgttgaaacaaattctgttgatcgaagaaatgttcttcttggcttaggtggtctttatggtgttgctaatgctataccattagctgcatccgctgctccagctccacctcctgatctctcgtcttgtagtatagccaggattaacgaaaatcaggtggtgccgtacagttgttgcgcgcctaagcctgatgatatggagaaagttccgtattacaagttcccttctatgactaagctccgcatgaagctaatgaggagtatattgccaagtacaatctggcgattagtcgaatgaaagatcttgataagacacaacctttaaacccta

SEQ ID NO: 516 - DNA, 504 bp, Artificial
  Mutation introduced by TALE nuclease pair POT32_T02 within a POT32 allele
gcaagcttgtgcaatagtagtagtacatctctcaaaactccttttacttcttcctccacttctttatcttccactcctaagcccctctcaacttttcatccatggaaaacgtaaccaaatgttcaaagtttcatgcaaggttaccaataataacggtgaccaaaaccaaaacgttgaaacaaaattctgttgatcgaagaaatgttcttcttggcttaggtggtctttatggtgttgctaatgctataccattagctgcatccgctgctccagctccacctcctgatctctcgtcttgtagtatagccaggattaacgaaaatcaggtggtgccgtacagttgttgcgcgcctaagcctgatgatatggagaaagttccgtattacaagttcccttctatgactaaggtcagcctgctcatgaagctaatgaggagtatattgccaagtacaatttggcggttagcaagatgaggggatcttgataagacacaacccttttaaa

SEQ ID NO: 517 - DNA, 510 bp, Artificial
  Mutation introduced by TALE nuclease pair POT32_T02 within a POT32 allele
gcaagcttgtgcaatagtagtagtacatccctcaaaactccttttacttcttcctccacttctttaacttccactcctaaaccctctcaacttttcatccatggaaaacgtaaccaaatgttcaaagtttcatgcatggttaccaataataacggtgaccaaaaccaaaacgttgaaacgaattctgttgatcgaagaaatgttcttcttggcttaggtggtctttatggtgttgctaatgctataccattagctgcatccgctactccatctccacctcctgatctctcgtcttgtagtatagccaggattaacgaaactcatgtggtgccgtacagttgttgcgcgcctaagcctgatgatatggagaaagttccgtattacaagttcccttctatgactaacgtcagcctgctcatgaagctaatgaggagtatattgccaagtacaatctggcgattagtcgaatgaaagatcttgataagacacaacctttaaaccctattggtt

SEQ ID NO: 518 - DNA, 460 bp, Artificial
  Mutation introduced by TALE nuclease pair POT32_T02 within a POT32 allele
  misc_feature (265): n is a or c or t or g
gcaagcttgtgcaatagtagtagtacatctctcaaaactccttttacttcttcctccacttctttatcttccactcctaacgcctctcaacttttcatccatggaaaacgtaaccaaatgttcaaagtttcatgcaaggttaccaataataacggtgaccaaaaccaaaacgttgaaacaaattctgttgatcgaagaaatgttcttcttggcttaggtggtctttatggtgttgctaatgctataccattagctgcatccgctnctccatgctccacctcctgatctctcgtcttgtagtatagccaggattaacgaaaatcaggtggtgccgtacagttgttgcgcgcctaagcctgatgatatggagaaagttccgtattacaagttcccttctatgactaagctcctcagcctgctcatgaagctaatgaggagtatattgccaagtacaattgcg

SEQ ID NO: 519 - DNA, 515 bp, Artificial
  Mutation introduced by TALE nuclease pair POT32_T02 within a POT32 allele
gcaagcttgtgcaatagttgtagtacatccctcaaaactccttttacttcttcctccacttctttaacttccactcctaaaccctctcaacttttcatccatggaaaacgtaaccaaatgttcaaagtttcatgcatggttaccaataataacggtgaccaaaaccaaaacgttgaaacgaattctgttgatcgaagaaatgttcttcttggcttaggtggtctttatggtgttgctaatgctataccattagctgcatccgctactccatctccacctcctgatctctcgtcttgtagtatagccaggattaacgaaactcatgtggtgccgtacagttgttgcgcgcctaagcctgatgatatggagaaagttccgtattacaagttcccttctatgactaagctccgtgtgctgctctatgaagctaatgaggagtatattgccaagtacaatttggcggttagcaagatgaggggatcttgataagacacaacctttaaaccctattggtt

SEQ ID NO: 520 - DNA, 494 bp, Artificial
  Mutation introduced by TALE nuclease pair POT32_T02 within a POT32 allele
gcaagcttgtgcaatagttgtagtacatccctcaaaactccttttacttcttcctccacttctttaacttccactcctaaaccctctcaacttttcatccatggaaaacgtaaccaaatgttcaaagtttcatgcaaggttaccaataataacggtgaccaaaaccaaaacgttgaaacaaattctgttgatcgaagaaatgttcttcttggcttaggtggtctttatggtgttgctaatgctataccattagctgcatccgctgctccagctccacctcctgatctctcgtcttgtagtatagccaggattaacgaaaatcaggtggtgccgtacagttgttgcgcgcctaagcctgatgatatggagaaagttccgtattacaagttcccttctatgactaagctccgaagctaatgaggagtatattgccaagtacaatctggcgattagtcgaatgaaagatcttgataagacacaacctttaaacccta

SEQ ID NO: 521 - DNA, 513 bp, Artificial
  Mutation introduced by TALE nuclease pair POT32_T02 within a POT32 allele
  misc_feature (416): n is a or c or t or g
gcaagcttgtgcaatagttgtagtacatccctcaaaactccttttacttcttcctccacttctttaacttccactcctaaaccctctcaacttttcatccatggaaaacgtaaccaaatgttcaaagtttcatgcatggttaccaataataacggtgaccaaaaccaaaacgttgaaacgaattctgttgatcgaagaaatgttcttcttggcttaggtggtctttatggtgttgctaatgctataccattagctgcatccgctactccatctccacctcctgatctctcgtcttgtagtatagccaggattaacgaaactcatgtggtgccgtacagttgttgcgcgcctaagcctgatgatatggagaaagttccgtattacaagttcccttctatgactaagctccgtgtgcncctcatgaagctaatgaggagtatattgccaagtacaatttggcggttagcaagatgagggatcttgataagacacaacctttaaaccctattggtt

SEQ ID NO: 522 - DNA, 513 bp, Artificial
  Mutation introduced by TALE nuclease pair POT32_T02 within a POT32 allele
gcaagcttgtgcaatagtagtagtacatctctcaaaactccttttacttcttcctccacttctttatcttccactcctaagccctctcaacttttcatccatggaaaacgtaaccaaatgttcaaagtttcatgcaaggttaccaataataacggtgaccaaaaccaaaacgttgaaacaaattctgttgatcgaagaaatgttcttcttggcttaggtggtctttatggtgttgctaatgctataccattagctgcatccgctgctccagctccacctcctgatctctcgtcttgtagtatagccaggattaacgaaaatcaggtggtgccgtacagttgttgcgcgcctaagcctgatgatatggagaaagttccgtattacaagttcccttctatgactaagcttgtcagcctgctcatgaagctaatgaggagtatattgccaagtacaatctggcgattagtcgaatgagagatcttgataagacacaacctttaaaccctattggtt

SEQ ID NO: 523 - DNA, 486 bp, Artificial
  Mutation introduced by TALE nuclease pair POT32_T02 within a POT32 allele
gcaagcttgtgcaatagtagtagtacatctctcaaaactccttttacttcttcctccacttctttatcttccactcctaagcccctctcaacttttcatccatggaaaacgtaaccaaatgttcaaagtttcatgcaaggttatcaataataacggtgaccaaaacgttgaaacgaattctgttgatcgaagaaatgttcttcttggcttaggtggtctttatggtgttgctaatgctataccattagctgcatccgctgctccaaactccacctcctgatctctcgtcttgtagtatagccaggattaacgaaaatcaggtggtgccgtacagttgttgcgcgcctaagcctgatgatatggagaaagttccgtattacaagttcccttctatgactaagctccgagcctgctcatgaaagctaatgaggagtatattgccaagtacaatctggcgattagtcgaatgagagatcttgataagac

SEQ ID NO: 524 - DNA, 455 bp, Artificial
  Mutation introduced by TALE nuclease pair POT32_T02 within a POT32 allele
gcaagcttgtgcaatagttgtagtacatctctcaaaactccttttacttcttcctccacttctttatcttccactcctaaaccctctcaacttttcatccatggaaaacgtaaccaaatgttcaaagtttcatgcaaggttaccaataataacggtgaccaaaaccaaaacgttgaaacgaattctgttgatcgaagaaatgttcttcttggcttaggtggtctttatggtgttgctaatgctataccattagctgcatccgctactccatctccacctcctgatctctcgtcttgtagtatagccaggattaacgaaactcatgtggtgccgtacagttgttgcgcgcctaagcctgatgatatggagaaagttccgtattacaagttcccttctatgactaagctccgtcatgctgctcatgaagctaatgaggagtatattgccaagtacaa

SEQ ID NO: 525 - DNA, 506 bp, Artificial
  Mutation introduced by TALE nuclease pair POT32_T02 within a POT32 allele
gcaagcttgtgcaatagtagtagtacatctctcaaaactccttttacttcttcctccacttctttatcttccactcctaagcccctctcaacttttcatccatggaaaacgtaaccaaatgttcaaagtttcatgcaaggttatcaataataacggtgaccaaaacgttgaaacgaattctgttgatcgaagaaatgttcttcttggcttaggtggtctttatggtgttgctaatgctataccattagctgcatccgctgctccaactccacctcctgatctctcgtcttgtagtatagccaggattaacgaaaatcaggtggtgccgtacagttgttgcgcgcctaagcctgatgatatggagaaaggttccgtattacaagttcccttctatgactaagctctgcctgctcatgaagctaatgaggagtatattgccaagtacaatctggcgattagtcgaatgagagatcttgataagacacaacctttaaaccctattggtt

SEQ ID NO: 526 - DNA, 499 bp, Artificial
  Mutation introduced by TALE nuclease pair POT32_T02 within a POT32 allele
gcaagcttgtgcaatagtagtagtacatctctcaaaactccttttacttcttcctccacttctttatcttccactcctaagccctctcaacttttcatccatggaaaacgtaaccaaatgttcaaagtttcatgcaaggttaccaataataacggtgaccaaaaccaaaacgttgaaacaaattctgttgatcgaagaaatgttcttcttggcttaggtggtctttatggtgttgctaatgctataccattagctgcatccgctgctccagctccacctcctgatctctcgtcttgtagtatagccaggatttaacgaaaatcaggtggtgccgtacagttgttgcgcgcctaagcctgatgatatggagaaagttccgtattacaagttcccttctatgactaagctccgtcagcctgctcatgaagctaatgaggagtatattgccaagtacaatttggcggttagcaagatgaggggatcttgataagacacaacc

SEQ ID NO: 527 - DNA, 494 bp, Artificial
  Mutation introduced by TALE nuclease pair POT32_T02 within a POT32 allele
gcaagcttgtgcaatagtagtagtacatctctcaaaactccttttacttcttcctccacttctttatcttccactcctaagcccctctcaacttttcatccatggaaaacgtaaccaaatgttcaaagtttcatgcaaggttaccaataataacggtgaccaaaaccaaaacgttgaaacaaaattctgttgatcgaagaaatgttcttcttggcttaggtggtctttatggtgttgctaatgctataccattagctgcatccgctgctccagctccacctcctgatctctcgtcttgtagtatagccaggattaacgaaaatcaggtggtgccgtacagttgttgcgcgcctaagcctgatgatatggagaaagttccgtattacaagttcccttctatgactaagctccgtctgctgcctcatgaagctaatgaggagtatattgccaagtacaatctggcgattagtcgaatgaaagatcttgataagaca

SEQ ID NO: 528 - DNA, 552 bp, Artificial
  Mutation introduced by TALE nuclease pair POT32_T02 within a POT32 allele
gcaagcttgtgcaatagtagtagtacatctctcaaaactccttttacttcttcctccacttctttaacttccactcctaagcccctctcaacttttcatccatggaaaacgtaaccaaatgttcaaagtttcatgcaaggttaccaataataacggtgaccaaaaccaaaacgttgaaacgaattctgttgatcgaagaaatgttcttcttggcttaggtggtctttatggtgttgctaatgctataccattagctgcatccgctgctccagctccacctcctgatctctcgtcttgtagtatagccaggattaacgaaaatcaggtggtgccgtacagttgttgcgcgcctaagcctgatgatatggagaaagttccgtattacaagttcccttctatgactaagctccgcgggtcaagccgtgggcctggcacagcaccggcaacagccgctgcagcctgctcatgaagctaatgaggagtatattgccaagtacaatttggcggttagcaagatgagggatcttgataagacacaacctttaaacccta

SEQ ID NO: 529 - DNA, 501 bp, Artificial
  Mutation introduced by TALE nuclease pair POT32_T02 within a POT32 allele
gcaagcttgtgcaatagtagtagtaccactctcaaaactccttttacttcttcctccacttctttatcttccactcctaagcccctctcaacttttcctccatggaaaacgtaacaaaacgttcaaagtttcatgcaaggttaccaataataacggtgaccaaaacgttgaaacgaattctgttgatcgaagaaatgttcttcttggcttaggtggtctttatggtgttgctaatgctataccattagctgcatccgctactccagctccacctcctgatctctcatcttgtagtaaagcaaagattaatgaactacggaggtgccatacagttgttgcgctcccacgcctaaagatatgaagaaagttccatattacaagttcccttctatgactaagctccgtagcctgctcatgaagctaatgaggagtatattgccaagtacaatctggcgattagtcgaatgaaagatcttgataagacacaacctttaaacccta

SEQ ID NO: 530 - DNA, 488 bp, Artificial
  Mutation introduced by TALE nuclease pair POT32_T02 within a POT32 allele
gcaagcttgtgcaatagtagtagtacatctctcaaaactccttttacttcttcctccacttctttaacttccactcctaagccctctcaacttttcatccatggaaaacgtaaccaaatgttcaaagtttcatgcaaggttaccaataataacggtgaccaaaaccaaaacgttgaaacgaattctgttgatcgaagaaatgttcttcttggcttaggtggtctttatggtgttgctaatgctataccattagctgcatccgctgctccagctccacctcctgatctctcgtcttgtagtatagccaggattaacgaaaatcaggtggtgccgtacagttgttgcgcgcctaagcctgatgatatggagaaagttccgtattacaagttcccttctatgactaagctctgctcatgaagctaatgaggagtatattgccaaagtacaatttggcggttagcaagatgagggatcttgataagacacaa

SEQ ID NO: 531 - DNA, 494 bp, Artificial
  Mutation introduced by TALE nuclease pair POT32_T02 within a POT32 allele
gcaagcttgtgcaatagtagtagtacatctctcaaaactccttttacttcttcctccacttctttaacttccactcctaagccctctcaacttttcatccatggaaaacgtaaccaaatgttcaaagtttcatgcaaggttaccaataataacggtgaccaaaaccaaaacgttgaaacgaattctgttgatcgaagaaatgttcttcttggcttaggtggtctttatggtgttgctaatgctataccattagctgcatccgctgctccagctccacctcctgatctctcgtcttgtagtatagccaggattaacgaaaatcaggtggtgccgtacagttgttgcgcgcctaagcctgatgatatggagaaagttccgtattacaagttcccttctatggcctgctcatgaagctaatgaggagtatattgccaagtacaatctggcgattagtcgaatgaaagatcttgataagacacaacctttaaacccta

SEQ ID NO: 532 - DNA, 489 bp, Artificial
  Mutation introduced by TALE nuclease pair POT32_T02 within a POT32 allele
gcaagcttgtgcaatagtagtagtacatctctcaaaactccttttacttcttcctccacttctttacttccactcctaagccctctcaacttttcatccatggaaaacgtaaccaaatgttcaaagtttcatgcaaggttaccaataataacggtgaccaaaaccaaaacgttgaaacgaaattctgttgatcgaagaaatgttcttcttggcttaggtggtctttatggtgttgctaatgctataccattagctgcatccgctgctccagctccacctcctgatctctcgtcttgtagtatagccaggattaacgaaaatcaggtggtgccgtacagttgttgcgcgcctaagcctgatgatatggagaaagttccgtattacaagttcccttctatgactaagctccgtctgcagcctctatgaagctaatgaggagtatattgccaagtacaatctggcgattagtcgaatgaaagatcttgataa

SEQ ID NO: 533 - DNA, 497 bp, Artificial
  Mutation introduced by TALE nuclease pair POT32_T02 within a POT32 allele
gcaagcttgtgcaatagtagtagtacatctctcaaaactccttttacttcttcctccacttctttatcttccactcctaagccctctcaacttttcatccatggaaaacgtaaccaaatgttcaaagtttcatgcaaggttaccaataataacggtgaccaaaaccaaaacgttgaaacaaattctgttgatcgaagaaatgttcttcttggcttaggtggtctttatggtgttgctaatgctataccattagctgcatccgctgctccagctccacctcctgatctctcgtcttgtagtatagccaggattaacgaaaatcaggtggtgccgtacagttgttgcgcgcctaagcctgatgatatggagaaagttccgtattacaagttcccttctatgacagcctgctcatgaagctaatgaggagtatattgccaagtacaatttggcggttagcaagatgagggatcttgataagacacaacctttaaacccta

SEQ ID NO: 534 - DNA, 510 bp, Artificial
  Mutation introduced by TALE nuclease pair POT32_T02 within a POT32 allele
gcaagcttgtgcaatagtagtagtacatctctcaaaactccttttacttcttcctccacttctttaacttccactcctaagccctctcaacttttcatccatggaaaacgtaaccaaatgttcaaagtttcatgcaaggttaccaataataacggtgaccaaaaccaaaacgttgaaacgaattctgttgatcgaagaaatgttcttcttggcttaggtggtctttatggtgttgctaatgctataccattagctgcatccgctgctccagctccacctcctgatctctcgtcttgtagtatagccaggattaacgaaactcatgtggtgccgtacagttgttgcgcgcctaagcctgatgatatggagaaagttccgtattacaagttcccttctatgactaagctccagcctgctcatgaagctaatgaggagtatattgccaagtacaatttggcggttagcaagatgagggatctgataagacacaacctttaaaccctattggtt

SEQ ID NO: 535 - DNA, 506 bp, Artificial
  Mutation introduced by TALE nuclease pair POT32_T02 within a POT32 allele
gcaagcttgtgcaatagtagtactacatctctcaaaactccttttacttcttcctccacttctttatcttccactcctaagcccctctcaacttttcatccatggaaaacgtaaccaaatgttcaaagtttcatgcaaggttatcaataataacggtgaccaaaacgttgaaacgaattctgttgatcgaagaaatgttcttcttggcttaagtggtctttatggtgttgctaatgctataccattagctgcatccgctgctccaactccacctcctgatctctcgtcttgtagtatagccaggattaacgaaaatcaggtggtgccgtacagttgttgcgcgcctaagcctgatgatatggagaaagttccgtattacaagttcccttctatgactaagctccagcctgctcatgaagctaatgaggagtatattgccaagtacaatctggcgattagtcgaatgagagatcttgataagacacaacctttaaaccctattggtt

SEQ ID NO: 536 - DNA, 484 bp, Artificial
  Mutation introduced by TALE nuclease pair POT32_T02 within a POT32 allele
  misc_feature (159): n is a or c or t or g
gcaagcttgtgcaatagtagtagtacatccctcaaaactccttttacttcttcctccacttctttaacttccactcctaaacccctctcaacttttcatccatggaaaacgtaaccaaatgttcaaagtttcatgcatggttaccaataataacggtgnccaaaaccaaaacgttgaaacgaattctgttgatcgaagaaatgttcttcttggcttaggtggtctttatggtgttgctaatgctataccattagctgcatccgctactccatctccacctcctgatctctcgtcttgtagtatagccaggattaacgaaactcatgtggtgccgtacagttgttgcgcgcctaagcctgatgatatggagaaagttccgtattacaagttcccttctatgactaagctccgtgtagctaatgaggagtatattgccaagtacaatctggcgattagtcgaatgaaagatcttgataagacacaa

SEQ ID NO: 537 - DNA, 511 bp, Artificial
  Mutation introduced by TALE nuclease pair POT32_T02 within a POT32 allele
gcaagcttgtgcaatagtagtagtacatctctcaaaactccttttacttcttcctccacttctttatcttccactcctaagcccctctcaacttttcatccatggaaaacgtaaccaaatgttcaaagtttcatgcaaggttaccaataataacggtgaccaaaaccaaaacgttgaaacgaattctgttgatcgaagaaatgttcttcttggcttaggtggtctttatggtgttgctaatgctataccattagctgcatccgctgctccagctccaccctctgtctctctgtctagtatacaggcatgatacgaaaatcaggtggtgccgtacagttgttgcgcgcctaagcctgatgatatggagaaagttccgtattacaagttcccttctatgactaagctctcagcctgctcatgaagctaatgaggagtatattgccaagtacaatttggcggttagcaagatgaggggatcttgataagacacaacctttaaaccctattggtt

SEQ ID NO: 538 - DNA, 459 bp, Artificial
  Mutation introduced by TALE nuclease pair POT32_T02 within a POT32 allele
gcaagcttgtgcaatagtagtagtacatctctcaaaactccttttacttcttcctccacttctttatcttccactcctaagcccctctcaacttttcatccatggaaaacgtaaccaaatgttcaaagtttcatgcaaggttatcaataataacggtgaccaaaacgttgaaacgaattctgttgatcgaagaaatgttcttcttggcttaggtggtctttatggtgttgctaatgctataccattagctgcatccgctgctccaactccacctcctgatctctcgtcttgtagtatagccaggattaacgaaaatcaggtggtgccgtacagttgttgcgcgcctaagcctgatgatatggagaaagttccgaagctaatgaggagtatattgccaagtacaatctggcgattagtcgaatgagagatcttgataagacacaacctttaaaccctatt

SEQ ID NO: 539 - DNA, 504 bp, Artificial
  Mutation introduced by TALE nuclease pair POT32_T02 within a POT32 allele
  misc_feature (159): n is a or c or t or g
gcaagcttgtgcaatagttgtagtacatccctcaaaactccttttacttcttcctccacttctttaacttccactcctaaaccctctcaacttttcatccatggaaaacgtaaccaaatgttcaaagtttcaatgcatggttaccaataataacggtgnccaaaaccaaaacgttgaaacgaattctgttgatcgaagaaatgttcttcttggcttaggtggtctttatggtgttgctaatgctataccattagctgcatccgctactccatctccacctcctgatctctcgtcttgtagtatagccaggattaacgaaactcatgtggtgccgtacagttgttgcgcgcctaagcctgatgatatggagaaagttccgtattacaagttcccttctatgactaagctccgtcagcctgctcatgaagctaatgaggagtatattgccaagtacaatctggcgattagtcgaatgaaagatcttgataagacacaacctttaaa

SEQ ID NO: 540 - DNA, 474 bp, Artificial
  Mutation introduced by TALE nuclease pair POT32_T02 within a POT32 allele
gcaagcttgtgcaatagttgtagtacatccctcaaaactccttttacttcttcctccacttctttaacttccactcctaaaccctctcaacttttcatccatggaaaacgtaaccaaatgttcaaagtttcatgcatggttaccaataataacggtgaccaaaaccaaaacgttgaaacgaattctgttgatcgaagaaatgttcttcttggcttaggtggtctttatggtgttgctaatgctataccattagctgcatccgctactccatctccacctcctgatctctcgtcttgtagtatagccaggattaacgaaactcatgtggtgccgtacagttgttgcgcgcctaagcctgatgatatggagaaagttccgtattacaagttcccttctatgactaagctccgtgtgctctgcatgaagctaatgaggagtatattgccaagtacaatttggcggttagcaagatga

SEQ ID NO: 541 - DNA, 491 bp, Artificial
  Mutation introduced by TALE nuclease pair POT32_T02 within a POT32 allele
gcaagcttgtgcaatagtagtagtacatctctcaaaactccttttacttcttcctccacttctttatcttccactcctaagcccctctcaacttttcatccatggaaaacgtaaccaaatgttcaaagtttcatgcaaggttatcaataataacggtgaccaaaacgttgaaacgaattctgttgatcgaagaaatgttcttcttggcttaggtggtctttatggtgttgctaatgctatttaccattagctgcatccgctgctccaactccacctcctgatctctcgtcttgtagtatagccaggattaacgaaaatcaggtggtgccgtacagttgttgcgcgcctaagcctgatgatatggagaaagttccgtattacaagttcccttctatgactaagctccgttcagcctgctcatgaagctaatgaggagtatattgccaagtacaatctggcgatttagtcgaatgagagatcttgataagaca

SEQ ID NO: 542 - DNA, 481 bp, Artificial
  Mutation introduced by TALE nuclease pair POT32_T02 within a POT32 allele
gcaagcttgtgcaatagtagtagtacatctctcaaaactccttttacttcttcctccacttctttatcttccactcctaagccctctcaacttttcatccatggaaaacgtaaccaaatgttcaaagtttcatgcaaggttaccaataataacggtgaccaaaaccaaaacgttgaaacgaattctgttgatcgaagaaatgttcttcttggcttaggtggtctttatggtgttgctaatgctataccattagctgcatccgctgctccagctccacctcctgatctctcgtcttgtagtatagccaggattaacgaaaatcaggtggtgccgtacagttgttgcgcgcctaagcctgatgatatggagaaagttccgtattacaagttcccttctatgactaagcttattgccaagtacaattttggcggttagcaagatgaggggatcttgataagacacaacctttaaaccctattgg

SEQ ID NO: 543 - DNA, 516 bp, Artificial
  Mutation introduced by TALE nuclease pair POT32_T02 within a POT32 allele
gcaagcttgtgcaatagtagtagtacatccctcaaaactccttttactttcttcctccacttctttaacttccactcctaaaccctctcaacttttcatccatggaaaacgtaaccaaatgttcaaagtttcatgcatggttaccaataataacggtgaccaaaaccaaaacgttgaaacgaattctgttgatcgaagaaatgttcttcttggcttaggtggtctttatggtgttgctaatgctataccattagctgcatccgctactccatctccacctcctgatctctcgtcttgtagtatagccaggattaacgaaaatcaggtggtgccgtacagttgttgcgcgcctaagcctgatgatatggagaaagttccgtattacaagttcccttctatgactaagctccgttcagcctgctcatgaagctaatgaggagtatattgccaagtacaatctggcgattagtcgaatgagagatcttgataagacacaacctttaaaccctattggtt

SEQ ID NO: 544 - DNA, 503 bp, Artificial
  Mutation introduced by TALE nuclease pair POT32_T02 within a POT32 allele
gcaagcttgtgcaatagtagtagtacatctctcaaaactccttttacttcttcctccacttctttatcttccactcctaagccctctcaacttttcatccatggaaaacgtaaccaaatgttcaaagtttcatgcaaggttaccaataataacggtgaccaaaaccaaaacgttgaaacaaattctgttgatcgaagaaatgttcttcttggcttaggtggtctttatggtgttgctaatgctataccattagctgcatccgctgctccagctccacctcctgatctctcgtcttgtagtatagccaggattaacgaaaatcaggtggtgccgtacagttgttgcgcgcctaagcctgatgatatggagaaagttccgtattacaagttcccttctatgactaagccagcctgctcatgaagctaatgaggagtatattgccaagtacaatctggcgattagtcgaatgaaagatcttgataagacacaacctttaaacccta

SEQ ID NO: 545 - DNA, 475 bp, Artificial
  Mutation introduced by TALE nuclease pair POT32_T02 within a POT32 allele
gcaagcttgtgcaatagttgtagtacatccctcaaaactccttttacttcttcctccacttctttaacttccactcctaaacccctctcaacttttcatccatggaaaacgtaaccaaatgttcaaagtttcatgcatggttaccaataataacggtgccaaaaccaaaacgttgaaacgaattctgttgatcgaagaaatgttcttcttggcttaggtggtctttatggtgttgctaatgctataccattagctgcatccgctactccatctccacctcctgatctctcgtcttgtagtatagccaggattaacgaaactcatgtggtgccgtacagttgttgcgcgcctaagcctgatgatatggagaaagttccgtattacaagttcccttctatgactaagctccgtcagcctgctcatgaagctaatgaggagtatattgccaagtacaatttggcggttagcaagatga

SEQ ID NO: 546 - DNA, 488 bp, Artificial
  Mutation introduced by TALE nuclease pair POT32_T02 within a POT32 allele
gcaagcttgtgcaatagtagtagtacatctctcaaaactccttttacttcttcctccacttctttatcttccactcctaagcccctctcaacttttcatccatggaaaacgtaaccaaatgttcaaagtttcatgcaaggttatcaataataacggtgaccaaaacgttgaaacgaattctgttgatcgaagaaatgttcttcttggcttaggtggtctttatggtgttgctaatgctataccattagctgcatccgctgctccaactccacctcctgatctctcgtcttgtagtatagccaggattaacgaaaatcaggtggtgccgtacagttgttgcgcgcctaagcctgatgatatggagaaagttccgtattacaagttcccttctatgactaagctccgtcagcctgctcatgaagctaatgaggagtatattgccaagtacaatctggcgattagtcgaatgagagatcttgataagacac

SEQ ID NO: 547 - DNA, 475 bp, Artificial
  Mutation introduced by TALE nuclease pair POT32_T02 within a POT32 allele
gcaagcttgtgcaatagttgtagtacatccctcaaaactccttttacttcttcctccacttctttaacttccactcctaaaccctctcaacttttcatccatggaaaacgtaaccaaatgttcaaagtttcatgcatggttaccaataataacggtgaccaaaaccaaaacgttgaaacgaattctgttgatcgaagaaatgttcttcttggcttaggtggtctttatggtgttgctaatgctataccattagctgcatccgctactccatctccacctcctgatctctcgtcttgtagtatagccaggattaacgaaactcatgtggtgccgtacagttgttgcgcgcctaagcctgatgatatggagaaagttccgtattacaagttcccttctatgactaagctccgtgtgcctgcctcatgaagctaatgaggagtatattgccaagtacaatttggcggttagcaagatg

SEQ ID NO: 548 - DNA, 510 bp, Artificial
  Mutation introduced by TALE nuclease pair POT32_T02 within a POT32 allele
gcaagcttgtgcaatagttgtagtacatctctcaaaactccttttacttcttcctccacttctttaacttccactcctaaaccctctcaacttttcatccatggaaaacgtaaccaaatgttcaaagtttcatgcaaggttaccaataataacggtgaccgaaaaccaaaacagttgaaacgaattctgttgatcgaagaaatgttcttcttggcttaggtggtctttatggtgttgctaatgctataccattagctgcatccgctgctccagctccacctcctgatctctcgtcttgtagtatagccaggattaacgaaaatcaggtggtgccgtacagttgttgcgcgcctaagcctgatgatatggagaaagttccgtattacaagttcccttctatgactaagctcagcctgctcatgaagctaatgaggagtatattgccaagtacaatttggcggttagcaagatgaggggatcttgataagacacaaccttttaaaccctatt

SEQ ID NO: 549 - DNA, 516 bp, Artificial
  Mutation introduced by TALE nuclease pair POT32_T02 within a POT32 allele
gcaagcttgtgcaatagtagtagtacatctctcaaaactccttttacttcttcctccacttctttatcttccactcctaagcccctctcaacttttcatccatggaaaacgtaaccaaatgttcaaagtttcatgcaaggttaccaataataacggtgaccaaaaccaaaacgttgaaacaaattctgttgatcgaagaaatgttcttcttggcttaggtggtctttatggtgttgctaatgctataccattagctgcatccgctactccatgtccacctcctgatctctcgtcttgtagtatagccaggatttaacgaaaactcatgtggtgccgtacagttgttgcgcgcctaagcctgatgatatggagaaagttccgtattacaagttcccttctatgactaagctccgtctgctcctcatgaagctaatgaggagtatattgccaagtacaatctggcgattagtcgaatgaaagatcttgataagacacaacctttaaaccctattggtt

SEQ ID NO: 550 - DNA, 519 bp, Artificial
  Mutation introduced by TALE nuclease pair POT32_T02 within a POT32 allele
  misc_feature (158); (478): n is a or c or t or g
gcaagcttgtgcaatagttgtagtacatccctcaaaactccttttacttcttcctccacttctttaacttccactcctaaaccctctcaacttttcatccatggaaaacgtaaccaaatgttcaaagtttcatgcatggttaccaataataacggtgnccaaaaccaaaacgttgaaacgaattctgttgatcgaagaaatgttcttcttggcttaggtggtctttatggtgttgctaatgctataccattagctgcatccgctactccatctccacctcctgatctctcgtcttgtagtatagccaggattaacgaaactcatgtggtgccgtacagttgttgcgcgccttaagcctgatgatatggagaaagttccgtattacaagttcccttctatgactaagctccgtgatgcctgcctcatgaagctaatgaggagtatattgccaagtacaatttggcggttagcaagatgnggggatcttgataagacacaaccttttaaaccctattggtt

SEQ ID NO: 551 - DNA, 516 bp, Artificial
  Mutation introduced by TALE nuclease pair POT32_T02 within a POT32 allele
gcaagcttgtgcaatagtagtagtacatctctcaaaactccttttacttcttcctccacttctttatcttccactcctaagcccctctcaacttttcatccatggaaaacgtaaccaaatgttcaaagtttcatgcaaggttaccaataataacggtgaccaaaaccaaaacgttgaaacgaattctgttgatcgaagaaatgttcttcttggcttaggtggtctttatggtgttgctaatgctataaccattagctgcatccgctgctccagctccacctcctgatctctcgtcttgtagtatagccaggattaacgaaaatcaggtggtgccgtacagttgttgcgcgcctaagcctgatgatatggagaaagttccgtattacaagttcccttctatgactaagctccgtcagcctgctcatgaagctaatgaggagtatattgccaagtacaatttggcggttagcaagatgagggatcttgataagacacaacctttaaaccctattggtt

SEQ ID NO: 552 - DNA, 516 bp, Artificial
  Mutation introduced by TALE nuclease pair POT32_T02 within a POT32 allele
gcaagcttgtgcaatagtagtagtacatctctcaaaacatccttttacttcttcctccacttctttaacttccactcctaagccctctcaacttttcatccatggaaaacgtaaccaaatgttcaaagtttcatgcaaggttaccaataataacggtgaccaaaaccaaaacgttgaaacgaattctgttgatcgaagaaatgttcttcttggcttaggtggtctttatggtgttgctaatgctataccattagctgcatccgctgctccagctccacctcctgatctctcgtcttgtagtatagccaggattaacgaaaatcaggtggtgccgtacagttgttgcgcgcctaagcctgatgatatggagaaagttccgtattacaagttcccttctatgactaagctttcgtcagcctgctcatgaagctaatgaggagtatattgccaagtacaatctggcgattagtcgaatgaaagatcttgataagacacaacctttaaaccctattggtt

SEQ ID NO: 553 - DNA, 465 bp, Artificial
  Mutation introduced by TALE nuclease pair POT32_T02 within a POT32 allele
  misc_feature (429): n is a or c or t or g
gcaagcttgtgcaatagtagtagtacatctctcaaaactccttttacttcttcctccacttctttatcttccactcctaagccctctcaacttttcatccatggaaaacgataccaaatgttcaaagtttcatgcaaggttatcaataataacggtgccaaacgttgaaacgaattctgttgatcgaagaaatgttcttcttgggcttagggtggtctttatggtgttgctaatgctataccattagctgcatccgctgctccaactccacctcctgatctctcgtcttgtagtatagccaggattaacgaaaatcaggtggtgccgtacagttgttgcgcgcctaagcctgatgatatggagaaagttccgtattacaagttcccttctatgactaaagctccgtcagcctgctcatgaagctaatgnggagtatattgccaagtacaatctggcgattagtcg

SEQ ID NO: 554 - DNA, 511 bp, Artificial
  Mutation introduced by TALE nuclease pair POT32_T02 within a POT32 allele
gcaagcttgtgcaatagtagtagtacatctctcaaaactccttttacttcttcctccacttctttatcttccactcctaagccctctcaacttttcatccatggaaaacgtaaccaaatgttcaaagtttcatgcaaggttaccaataataacggtgaccaaaaccaaaacgttgaaacaaattctgttgatcgaagaaatgttcttcttggcttaggtggtctttatggtgttgctaatgctataccattagctgcatccgctgctccagctccacctcctgatctctcgtcttgtagtatagccaggattaacgaaaatcaggtggtgccgtacagttgttgcgcgcctaagcctgatgatatggagaaagttccgtattacaagttcccttctatgactaagctcgtcagcctgctcatgaagctaatgaggagtatattgccaagtacaatctggcgattagtcgaatgaaagatcttgataagacacaacctttaaaccctattgg

SEQ ID NO: 555 - DNA, 490 bp, Artificial
  Mutation introduced by TALE nuclease pair POT32_T02 within a POT32 allele
gcaagcttgtgcaatagtagtagtacatctctcaaaactccttttacttcttcctccacttctttatcttccactcctaagcccctctcaacttttcatccatggaaaacgtaaccaaatgttcaaagtttcatgcaaggttatcaataataacggtgaccaaaacgttgaaacgaattctgttgatcgaagaaatgttcttcttggcttaggtggtctttatggtgttgctaatgctataccattagctgcatccgctgctccagctccacctcctgatctctcgtcttgtagtatagccaggattaacgaaaatcaggtggtgccgtacagttgttgcgcgcctaagcctgatgatatggagaaagttccgtattacaagttcccttctatgactaagctccgtgaagctaatgaggagtatattgccaagtacaatttggcggttagcaagatgagagatcttgataagacacaacctttaaaccct

SEQ ID NO: 556 - DNA, 492 bp, Artificial
  Mutation introduced by TALE nuclease pair POT32_T02 within a POT32 allele
gcaagcttgtgcaatagttgtagtacatctctcaaaactccttttacttcttcctccacttctttaacttccactcctaaaccctctcaacttttcatccatggaaaacgtaaccaaatgttcaaagtttcatgcaaggttaccaataataacggtgaccaaaaccaaaacgttgaaacgaattctgttgatcgaagaaatgttcttcttggcttaggtggtctttatggtgttgctaatgctataccattagctgcatccgctactccatctctacctcctgatctctcgtcttgtagtatagccaggattaacgaaactcatgtggtgccgtacagttgttgcgcgcctaagcctgatgatatggagaaagttccgtattacaagttcccttctatgactaagctccgtgctcatgaagctaatgaggagtatattgccaagtacaatttggcggttagcaagatgagggatcttgataagacacaaccc

SEQ ID NO: 557 - DNA, 467 bp, Artificial
  Mutation introduced by TALE nuclease pair POT32_T02 within a POT32 allele
gcaagcttgtgcaatagtagtagtacatctctcaaaactccttttacttcttcctccacttctttaacttccactcctaagcccctctcaacttttcatccatggaaaacgtaaccaaatgttcaaagtttcatgcaaggttaccaataataacggtgaccaaaaccaaaacgttgaaacgaattctgttgatcgaagaaatgttcttcttggcttaggtggtctttatggtgttgctaatgctataccattagctgcatccgctgctccagctccacctcctgatctctcgtcttgtagtatagccaggattaacgaaaatcaggtggtgccgtacagttgttgcgcgcctaagcctgatgatatggagaaagttccgtattacaagttcccttctatgactaagctccgtgttgccaagtacaatttggcggttagcaagatgaggggatcttgataagacacaa

SEQ ID NO: 558 - DNA, 501 bp, Artificial
  Mutation introduced by TALE nuclease pair POT32_T02 within a POT32 allele
gcaagcttgtgcaatagtagtagtacatctctcaaaactccttttacttcttcctccacttctttaacttccactcctaagcccctctcaacttttcatccatggaaaacgtaaccaaatgttcaaagtttcatgcaaggttaccaataataacggtgaccaaaaccaaaacgttgaaacgaattctgttgatcgaagaaatgttcttcttggcttaggtggtctttatggtgttgctaatgctataccattagctgcatccgctgctccagctccacctcctgatctctcgtcttgtagtatagccaggattaacgaaaatcaggtggtgccgtacagttgttgcgcgcctaagcctgatgatatggagaaagttccgtattacaagttcccttctatgactaagctctgctcatgaagctaatgaggagtatattgccaagtacaatttggcggttagcaagatgagggatcttgataagacacaacctttaaacccta

SEQ ID NO: 559 - DNA, 464 bp, Artificial
  Mutation introduced by TALE nuclease pair POT32_T02 within a POT32 allele
gcaagcttgtgcaatagtagtagtacatctctcaaaactccttttacttcttcctccacttctttaacttccactcctaagccctctcaacttttcatccatggaaaacgtaaccaaatgttcaaagtttcatgcaaggttaccaataataacggtgaccaaaaccaaaacgttgaaacaaattctgttgatcgaagaaatgttcttcttggcttaggtggtctttatggtgttgctaatgctataccattagctgcatccgctgctccagctccacctcctgatctctcgtcttgtagtatagccaggattaacgaaaatcaggtggtgccgtacagttgttgcgcgcctaagcctgatgatatggagaaagttccgtattacaagttcccttctatgactaagctccgtctgcgcctctcatgaagctaatgaggagtatattgccaagtacaattgcgttg

SEQ ID NO: 560 - DNA, 470 bp, Artificial
  Mutation introduced by TALE nuclease pair POT32_T02 within a POT32 allele
gcaagcttgtgcaatagttgtagtacatccctcaaaactcctttttacttcttcctccacttctttaacttccactcctaaaccctctcaacttttcatccatggaaaacgtaaccaaatgttcaaagtttcatgcatggttaccaataataacggtgaccaaaaccaaaacgttgaaacgaattctgttgatcgaagaaatgttcttcttggcttaggtggtctttatggtgttgctaatgctataccattagctgcatccgctgctccagctccacctcctgatctctcgtcttgtagtatagccaggattaacgaaaatcaggtggtgccgtacagttgttgcgcgcctaagcctgatgatatggagaaagttccgtattacaagttcccttctatgactaagctccgtgtctggcgattagtcgaatgaaagatcttgataagacacaacctttaaaccctattgg

SEQ ID NO: 561 - DNA, 476 bp, Artificial
  Mutation introduced by TALE nuclease pair POT32_T02 within a POT32 allele
gcaagcttgtgcaatagtagtagtacatctctcaaaactccttttacttcttcctccacttctttatcttccactcctaagcccctctcaacttttcatccatggaaaacgtaaccaaatgttcaaagtttcatgcaagggttatcaataataacggtgaccaaaacgttgaaacgaattctgttgatcgaagaaatgttcttcttggcttaggtggtctttatggtgttgctaatgctataccattagctgcatccgctgctccaactccacctcctgatctctcgtcttgtagtatagccaggattaacgaaaatcaggtggtgccgtacagttgttgcgcgcctaagcctgatgatatggagaaagttccgtattacaagttcccttctatgactaagctccgttcagcctgctcatgaagctaatgaggagtatattgccaagtacaactggcgattagtcgaatagagatc

SEQ ID NO: 562 - DNA, 516 bp, Artificial
  Mutation introduced by TALE nuclease pair POT32_T02 within a POT32 allele
gcaagcttgtgcaatagtagtagtacatctctcaaaactccttttacttcttcctccacttctttatcttccactcctaagcccctctcaacttttcatccattgaaaacgtaaccaaatgttcaaagtttcatgcaaggttaccaataataacggtgaccaaaaccaaaacgttgaaacgaattctgttgatcgaagaaatgttcttcttggcttaggtggtctttatggtgttgctaatgctataccattagctgcatccgctactccatctccacctcctgatctctcatcttgtagtaaagcaaagattaatgaaactacggaggtgccatacagttgttgcgctcccacgcctaaagatatgaagaaagttccatattacaagttcccttctatgactaagctccgtcagcctgctcatgaagctaatgaggagtatattgccaagtacaatttggcggttagcaagatgaggggatcttgataagacacaacctttaaaccctattggtt

SEQ ID NO: 563 - DNA, 515 bp, Artificial
  Mutation introduced by TALE nuclease pair POT32_T02 within a POT32 allele
gcaagcttgtgcaatagtagtagtacatccctcaaaactccttttacttcttcctccacttctttaacttccactcctaaaccctctcaacttttcatccatggaaaacgtaaccaaatgttcaaagtttcatgcatggttaccaataataacggtgaccaaaaccaaaacgttgaaacgaattctgttgatcgaagaaatgttcttcttggcttaggtggtctttatggtgttgctaatgctataccattagctgcatccgctactccatctccacctcctgatctctcgtcttgtagtatagccaggattaacgaaactcatgtggtgccgtacagttgttgcgcgcctaagcctgatgatatggagaaagttccgtattacaagttcccttctatgactaagctccgtcagcctgctcatgaagctaatgaggagtatattgccaagtacaatttggcggttagcaagatgaggggatcttgataagacacaacctttaaaccctattggtt

SEQ ID NO: 564 - DNA, 488 bp, Artificial
  Mutation introduced by TALE nuclease pair POT32_T02 within a POT32 allele
gcaagcttgtgcaatagtagtagtacatctctcaaaactccttttacttcttcctccacttctttatcttccactcctaagcccctctcaacttttcatccatggaaaacgtaaccaaatgttcaaagtttcatgcaaggttaccaataataacggtgaccaaaaccaaaacgttgaaacaaattctgttgatcgaagaaatgttcttcttggcttaggtggtctttatggtgttgctaatgctataccattagctgcatccgctgctccagctccacctcctgatctctcgtcttgtagtatagccaggattaacgaaaatcaggtggtgccgtacagttgttgcgcgcctaagcctgatgatatggagaaagttccgtattacaagttcccttctatgactaaggtcagcctgctcatgaagctaatgaggagtatattgcccaaagtacaatttggcggttagcaagatgagggatcttgataag

SEQ ID NO: 565 - DNA, 499 bp, Artificial
  Mutation introduced by TALE nuclease pair POT32_T02 within a POT32 allele
gcaagcttgtgcaatagtagtagtacatctctcaaaactccttttacttcttcctccacttctttatcttccactcctaagcccctctcaacttttcatccatggaaaacgtaaccaaatgttcaaagtttcatgcaaggttaccaataataacggtgaccaaaaccaaaacgttgaaacaaaattctgttgatcgaagaaatgttcttcttggcttaggtggtctttatggtgttgctaatgctataccattagctgcatccgctgctccagctccacctcctgatctctcgtcttgtagtatagccaggattaacgaaaatcaggtggtgccgtacagttgttgcgcgcctaagcctgatgatatggagaaagttccgtattacaagttcccttctatgactaagccagcctgctcatgaagctaatgaggagtatattgccaagtacaatctggcgattagtcgaatgaaagatcttgataagacacaaccctttt

SEQ ID NO: 566 - DNA, 476 bp, Artificial
  Mutation introduced by TALE nuclease pair POT32_T02 within a POT32 allele
gcaagcttgtgcaatagtagtagtacatctctcaaaactccttttacttcttcctccacttctttatcttccactcctaagcccctctcaacttttcatccatggaaaacgtaaccaaatgttcaaagtttcatgcaaggttaccaataataacggtgaccaaaaccaaaacgttgaaacgaattctgttgatcgaagaaatgttcttcttggcttaggtggtctttatggtgttgctaatgctataccattagctgcatccgctgctccagctccacctcctgatctctcgtcttgtagtatagccaggattaacgaaaatcaggtggtgccgtacagttgttgcgcgcctaagcctgatgatatggagaaagttccgtattacaagttcccttctatgactaagctccgtcagcctgctcatgaagctaatgaggagtatattgccaagtacaatttggcggttagcaagatga

SEQ ID NO: 567 - DNA, 469 bp, Artificial
  Mutation introduced by TALE nuclease pair POT32_T02 within a POT32 allele
gcaagcttgtgcaatagtagtagtacatctctcaaaactccttttacttcttcctccacttctttaacttccactcctaagccctctcaacttttcatccatggaaaacgtaaccaaatgttcaaagtttcatgcaaggttaccaataataacggtgaccaaaaccaaaacgttgaaacaaattctgttgatcgaagaaatgttcttcttggcttaggtggtctttatggtgttgctaatgctataccattagctgcatccgctgctccagctccacctcctgatctctcgtcttgtagtatagccaggattaacgaaaatcaggtggtgccgtacagttgttgcgcgcctaagcctgatgatatggagaaagttccgtattacaagttcccttctatgactaagctccgtcgtgcctcctgctcatgaagctaatgaggagtatattgccaagtacaattgcgttgcg

SEQ ID NO: 568 - DNA, 490 bp, Artificial
  Mutation introduced by TALE nuclease pair POT32_T02 within a POT32 allele
gcaagcttgtgcaatagttgtagtacatctctcaaaactccttttacttcttcctccacttctttaacttccactcctaaaccctctcaacttttcatccatggaaaacgtaaccaaatgttcaaagtttcatgcaaggttaccaataataacggtgaccaaaaccaaaacgttgaaacgaattctgttgatcgaagaaatgttcttcttggcttaggtggtctttatggtgttgctaatgctataccattagctgcatccgctactccatctctacctcctgatctctcgtcttgtagtatagccaggattaacgaaactcatgtggtgccgtacagttgttgcgcgcctaagcctgatgatatggagaaagttccgtattacaagttcccttctatgactaagctccgtgctcatgaagctaatgaggagtatattgccaagtacaatttggcggttagcaagatgaggggatcttgataagacacaa

SEQ ID NO: 569 - DNA, 490 bp, Artificial
  Mutation introduced by TALE nuclease pair POT32_T02 within a POT32 allele
gcaagcttgtgcaatagtagtagtacatctctcaaaactccttttacttcttcctccacttctttaacttccactcctaagcccctctcaacttttcatccatggaaaacgtaaccaaatgttcaaagtttcatgcaaggttaccaataataacggtgaccaaaaccaaaacgttgaaacgaattctgttgatcgaagaaatgttcttcttggcttaggtggtctttatggtgttgctaatgctataccattagctgcatccgctgctccagctccacctcctgatctctcgtcttgtagtatagccaggattaacgaaaatcaggtggtgccgtacagttgttgcgcgcctaagcctgatgatatggagaaagttccgtattacaagttcccttctatgactaagctctgctcatgaagctaatgaggagtatattgccaagtacaatttggcggttagcaagatgagggatcttgataagacacaacc

SEQ ID NO: 570 - DNA, 508 bp, Artificial
  Mutation introduced by TALE nuclease pair POT32_T02 within a POT32 allele
gcaagcttgtgcaatagtagtagtacatctctcaaaactccttttacttcttcctccacttctttatcttccactcctaagcccctctcaacttttcatccatggaaaacgtaaccaaatgttcaaagtttcatgcaaggttatcaataataacggtgaccaaaacgttgaaacgaattctgttgatcgaagaaatgttcttcttggcttaggtggtctttatggtgttgctaatgctataccattagctgcatccgctgctccaactccacctcctgatctctcgtcttgtagtatagccaggattaacgaaaatcaggtggtgccgtacagttgttgcgcgcctaagcctgatgatatggagaaagttccgtattacaagttcccttctatgactaagctcctcagcctgctcatgaagctaatgaggagtatattgccaagtacaatttggcggttagcaagatgagggatcttgataagacacaacctttaaaccctattggtt

SEQ ID NO: 571 - DNA, 507 bp, Artificial
  Mutation introduced by TALE nuclease pair POT32_T02 within a POT32 allele
gcaagcttgtgcaatagtagtagtacatctctcaaaactccttttacttcttcctccacttctttaacttccactcctaagccctctcaacttttcatccatggaaaacgtaaccaaatgttcaaagtttcatgcaaggttaccaataataacggtgaccaaaaccaaaacgttgaaacgaattctgttgatcgaagaaatgttcttcttggcttaggtggtctttatggtgttgctaatgctataccattagctgcatccgctgctccagctccacctcctgatctctcgtcttgtagtatagccaggattaacgaaaatcaggtggtgccgtacagttgttgcgcacctaagcctgatgatatggagaaagttccgtattacaagttcccttctatgactaagctccgtcagcctgctcatgaagctaatgaggagtatattgccaagtacaatttgggcggttagcaagatgagggatcttgataagacacaacctttaaaccc

SEQ ID NO: 572 - DNA, 495 bp, Artificial
  Mutation introduced by TALE nuclease pair POT32_T02 within a POT32 allele
  misc_feature (158): n is a or c or t or g
gcaagcttgtgcaatagtagtagtacatctctcaaaactccttttacttcttcctccacttctttatcttccactcctaagccctctcaacttttcatccatggaaaacgtaaccaaatgttcaaagtttcatgcaaggttatcaataataacggtgnccaaaacgttgaaacgaattctgttgatcgaagaaatgttcttcttggcttaggtggtctttatggtgttgctaatgctataccattagctgcatccgctgctccaactccacctcctgatctctcgtcttgtagtatagccaggattaacgaaaatcaggtggtgccgtacagttgttgcgcgcctaagcctgatgatatggagaaagttccgtattacaagttcccttctatgactaagctcgtctgctgctctatgaagctaatgaggagtatattgccaagtacaatctggcgattagtcgaatgaagatcttgataagacacaacctttaaa

SEQ ID NO: 573 - DNA, 489 bp, Artificial
  Mutation introduced by TALE nuclease pair POT32_T02 within a POT32 allele
gcaagcttgtgcaatagtagtagtacatctctcaaaactccttttacttcttcctccacttctttatcttccactcctaagcccctctcaacttttcatccatggaaaacgtaaccaaatgttcaaagtttcatgcaaggttatcaataataacggtgaccaaaacgttgaaacgaattctgttgatcgaagaaatgttcttcttggcttaggtggtctttatggtgttgctaatgctataccattagctgcatccggctgctccagctccacctcctgatctctcgtcttgtagtatagccaggattaacgaaaatcaggtggtgccgtacagttgttgcgcgcctaagcctgatgatatggagaaagttccgtattacaagttcccttctatgactaagctccgtgagcctgctcatgaagctaatgaggagtatattgccaagtacaatctggcgattagtcgaatgaaagatcttgataagacac

SEQ ID NO: 574 - DNA, 515 bp, Artificial
  Mutation introduced by TALE nuclease pair POT32_T02 within a POT32 allele
gcaagcttgtgcaatagttgtagtacatctctcaaaactccttttactttcttcctccacttctttaacttccactcctaaaccctctcaacttttcatccatggaaaacgtaaccaaatgttcaaagtttcatgcaaggttaccaataataacggtgaccaaaaccaaaacgttgaaacgaattctgttgatcgaagaaatgttcttcttggcttaggtggtctttatggtgttgctaatgctataccattagctgcatccgctactccatctccacctcctgatctctcgtcttgtagtatagccaggattaacgaaactcatgtggtgccgtacagttgttgcgcgcctaagcctgatgatatggagaaagttccgtattacaagttcccttctatgactaagctccgtagcctgctcatgaagctaatgaggagtatattgccaagtacaatttggcggttagcaagatgaggggatcttgataagacacaacctttaaaccctattggtt

SEQ ID NO: 575 - DNA, 496 bp, Artificial
  Mutation introduced by TALE nuclease pair POT32_T02 within a POT32 allele
gcaagcttgtgcaatagtagtagtacatccctcaaaactccttttacttcttcctccacttctttaacttccactcctaaaccctctcaacttttcatccatggaaaacgtaaccaaatgttcaaagtttcatgcatggttaccaataataacggtgaccaaaaccaaaacgttgaaacgaattctgttgatcgaagaaatgttcttcttggcttaggtggtctttatggtgttgctaatgctataccattagctgcatccgctactccatctccacctcctgatctctcgtcttgtagtatagccaggattaacgaaactcatgtggtgccgtacagttgttgcgcgcctaagcctgatgatatggagaaagttccgtattacaagttcccttctatgactaagctccgtgtagctaatgaggagtatattgccaagtacaatctggcgattagtcgaatgaaagatcttgataagacacaacctttaaacccta

SEQ ID NO: 576 - DNA, 508 bp, Artificial
  Mutation introduced by TALE nuclease pair POT32_T02 within a POT32 allele
gcaagcttgtgcaatagtagtagtacatctctcaaaactccttttacttcttcctccacttctttatcttccactcctaagccctctcaacttttcatccatggaaaacgtaaccaaatgttcaaagtttcatgcaaggttatcaataataacggtgaccaaaacgttgaaacgaattctgttgatcgaagaaatgttcttcttggcttaggtggtctttatggtgttgctaatgctataccattagctgcatccgctgctccaactccacctcctgatctctcgtcttgtagtatagccaggattaacgaaaatcaggtggtgccgtacagttgttgcgcgcctaagcctgatgatatggagaaagttccgtattacaagttcccttctatgactaagctcctcagcctgctcatgaagctaatgaggagtatattgccaagtacaatttggcggttagcaagatgaggggatcttgataagacacaacctttaaaccctattggtt

SEQ ID NO: 577 - DNA, 515 bp, Artificial
  Mutation introduced by TALE nuclease pair POT32_T02 within a POT32 allele
gcaagcttgtgcaatagttgtagtacatctctcaaaactccttttacttcttcctccacttctttaacttccactcctaaaccctctcaacttttcatccatggaaaacgtaaccaaatgttcaaagtttcatgcaaggttaccaataataacggtgaccaaaaccaaaacgttgaaacgaattctgttgatcgaagaaatgttcttcttggcttaggtggtctttatggtgttgctaatgctataccattagctgcatccgctactccatctccacctcctgatctctcgtcttgtagtatagccaggattaacgaaactcatgtggtgccgtacagttgttgcgcgcctaagcctgatgatatggagaaagttccgtattacaagttcccttctatgactaagctccgtcagcctgctcatgaagctaatgaggagtatattgccaagtacaatttggcggttagcaagatgaggggatcttgataagacacaacctttaaaccctattggtt

SEQ ID NO: 578 - DNA, 495 bp, Artificial
  Mutation introduced by TALE nuclease pair POT32_T02 within a POT32 allele
gcaagcttgtgcaatagtagtagtacatctctcaaaactccttttacttcttcctccacttctttaacttccactcctaagcccctctcaacttttcatccatggaaaacgtaaccaaatgttcaaagtttcatgcaaggttaccaataataacggtgaccaaaaccaaaacgttgaaacgaattctgttggtcgagaaatgtcatttcttgcttgagtgtgcgtttattgtggttgtatgactataccattagctacatccgctgctccagctccacctcctgatctctcgtcttgtagtatagccaggattaacgaaaatcaggtggtgccgtacagttgttgcgcgcctaagcctgatgatatggagaaagttccgtattacaagttcccttctatggcctgctcatgaagctaatgaggagtatattgccaagtacaatctggcgattagtcgaatgaaagatcttgataagacacaacctttaaacccta

SEQ ID NO: 579 - DNA, 473 bp, Artificial
  Mutation introduced by TALE nuclease pair POT32_T02 within a POT32 allele
gcaagcttgttcaatagtagtagtacatctctcaaaactccttttacttcttcctccacttctttaacttccactcctaagcccctctcaacttttcatccatggaaaacgtaaccaaatgttcaaagtttcatgcaaggttaccaataataacggtgaccaaaaccaaaacgttgaaacgaattctgttgatcgaagaaatgttcttcttggcttaggtggtctttatggtgttgctaatgctataccattagctgcatccgctgctccagctccacctcctgatctctcgtcttgtagtatagccaggattaacgaaaatcaggtggtgccgtacagttgttgcgcgcctaagcctgatgatatggagaaagttccgtattacaagttcccttctatgactaaagctcagcctgctcatgaagctaatgaggagtatattgccaagtacaatttggcggttagcaagatga

SEQ ID NO: 580 - DNA, 489 bp, Artificial
  Mutation introduced by TALE nuclease pair POT32_T02 within a POT32 allele
gcaagcttgtgcaatagtagtagtacatctctcaaaactccttttacttcttcctccacttctttatcttccactcctaagcccctctcaacttttcatccatggaaaacgtaaccaaatgttcaaagtttcatgcaaggttatcaataataacggtgaccaaaacgttgaaacgaattctgttgatcgaagaaatgttcttcttggcttaggtggtctttatggtgttgctaatgctataccattagctgcatccgctgctccaactccacctcctgatctctcgtcttgtagtatagccaggattaacgaaaatcaggtggtgccgtacagttgttgcgcgcctaagcctgatgatatggagaaagttccgtattacaagttcccttctatgactaagctccgttcagcctgctcatgaagctaatgaggagtatattgccaagtacaatctggcgattagtcgaatgagagatcttgataagacac

SEQ ID NO: 581 - DNA, 473 bp, Artificial
  Mutation introduced by TALE nuclease pair POT32_T02 within a POT32 allele
gcaagcttgttcaatagtagtagtacatctctcaaaactccttttacttcttcctccacttctttaacttccactcctaagcccctctcaacttttcatccatggaaaacgtaaccaaatgttcaaagtttcatgcaaggttaccaataataacggtgaccaaaaccaaaacgttgaaacgaattctgttgatcgaagaaatgttcttcttggcttaggtggtctttatggtgttgctaatgctataccattagctgcatccgctgctccagctccacctcctgatctctcgtcttgtagtatagccaggattaacgaaaatcaggtggtgccgtacagttgttgcgcgcctaagcctgatgatatggagaaagttccgtattacaagttcccttctatgactaagctcagcctgctcatgaagctaatgaggagtatattgccaagtacaattttggcggttagcaagatga

SEQ ID NO: 582 - DNA, 509 bp, Artificial
  Mutation introduced by TALE nuclease pair POT32_T02 within a POT32 allele
gcaagcttgtgcaatagtagtagtacatctctcaaaactccttttacttcttcctccacttctttatcttccactcctaagcccctctcaacttttcatccatggaaaacgtaaccaaatgttcaaagtttcatgcaaggttaccaataataacggtgaccaaaaccaaaacgttgaaacgaattctgttgatcgaagaaatgttcttcttggcttaggtggtctttatggtgttgctaatgctataccattagctgcatccgctgctccagctccacctcctgatctctcgtcttgtagtatagccaggattaacgaaaatcaggtggtgccgtacagttgttgcgcgcctaagcctgatgatatggagaaagttccgtattacaagttcccttctatgactaagctccgtcagcctgctcatgaagctaatgaggagtatattgccaagtacaattttggcggttagcaagatgagggatcttgataagacacaacctttaaatccc

SEQ ID NO: 583 - DNA, 525 bp, Artificial
  Mutation introduced by TALE nuclease pair POT32_T02 within a POT32 allele
gcaagcttgtgcaatagttgtagtacatccctcaaaactccttttacttcttcctccacttctttaacttccactcctaaaccctctcaacttttcatccatggaaaacgtaaccaaatgttcaaagtttcatgcatggttaccaataataacggtgaccaaaaccaaaacgttgaaacgaattctgttgatcgaagaaatgttcttcttggcttaggtggtctttatggtgttgctaatgctataccattagctgcatccgctactccatctccacctcctgatctctcgtcttgtagtatagccaggattaacgaaactcatgtggtgccgtacagttgttgcgcgcctaagcctgatgatatggagaaagttccgtattacaagttcccttctatgactaagctttcgtcagcctgctcatgaagctaatgaggagtatattgccaagtacaatctggcgattagtcgaatgaaagatcttgataagacacaacctttaaaccctatggttctgagacagcc

SEQ ID NO: 584 - DNA, 504 bp, Artificial
  Mutation introduced by TALE nuclease pair POT32_T02 within a POT32 allele
gcaagcttgtgcaatagtagtagtacatctctcaaaactccttttacttcttcctccacttctttaacttccactcctaagcccctctcaacttttcatccatggaaaacgtaaccaaatgttcaaagtttcatgcaaggttaccaataataacggtgaccaaaaccaaaacgttgaaacgaattctgttgatcgaagaaatgttcttcttggcttaggtggtctttatggtgttgctaatgctataccattagctgcatccgctgctccagctccacctcctgatctctcgtcttgtagtatagccaggattaacgaaaatcaggtggtgccgtacagttgttgcgcgcctaagcctgatgatatggagaaagtttccgtattacaagttcccttctatgactaagctttcgtcagcctgctcatgaagctaatgaggagtatatttgccaagtacaatctggcgattagtcgaatgaaagatcttgataagacacaaccttt

SEQ ID NO: 585 - DNA, 515 bp, Artificial
  Mutation introduced by TALE nuclease pair POT32_T02 within a POT32 allele
gcaagcttgtgcaatagtagtagtacatctctcaaaactccttttacttcttcctccacttctttatcttccactcctaagcccctctcaacttttcatccatggaaaacgtaaccaaatgttcaaagtttcatgcaaggttaccaataataacggtgaccaaaaccaaaacgttgaaacaaattctgttgatcgaagaaatgttcttcttggcttaggtggtctttatggtgttgctaatgctataccattagctgcatccgctgctccagctccacctcctgatctctcgtcttgtagtatagccaggatttaacgaaaatcaggtggtgccgtacagttgttgcgcgcctaagcctgatgatatggagaaagttccgtattacaagttcccttctatgactaagctcgtcagcctgctcatgaagctaatgaggagtatattgccaagtacaatctggcgattagtcgaatgaaagatcttgataagacacaacctttaaaccctattggtt

SEQ ID NO: 586 - DNA, 512 bp, Artificial
  Mutation introduced by TALE nuclease pair POT32_T02 within a POT32 allele
gcaagcttgtgcaatagttgtagtacatccctcaaaactccttttacttcttcctccacttctttaacttccactcctaaaccctctcaacttttcatccatggaaaacgtaaccaaatgttcaaagtttcatgcatggttaccaataataacggtgaccaaaaccaaaacgttgaaacgaattctgttgatcgaagaaatgttcttcttggcttaggtggtctttatggtgttgctaatgctataccattagctgcatccgctgctccagctccacctcctgatctctcgtcttgtagtatagccaggattaacgaaaatcaggtggtgccgtacagttgttgcgcgcctaagcctgatgatatggagaaagttccgtattacaagttcccttctatgactaagctccgagcctgctcatgaagctaatgaggagtatattgccaagtacaatttggcggttagcaagatgagggatcttgataagacacaacctttaaaccctattggtt

SEQ ID NO: 587 - DNA, 493 bp, Artificial
  Mutation introduced by TALE nuclease pair POT32_T02 within a POT32 allele
gcaagcttgtgcaatagtagtagtacatctctcaaaactccttttacttcttcctccacttctttaacttccactcctaagcccctctcaacttttcatccatggaaaacgtaaccaaatgttcaaagtttcatgcaaggttaccaataataacggtgaccaaaaccaaaacgttgaaaacgaattctgttggtcgagaaatgtcatttcttgcttgagtgagcgttttgtgttgtatgactataccattagctacatccgctgctccagctccacctcctgatctctcgtcttgtagtatagccaggattaacgaaaatcaggtggtgccgtacagttgttgcgcgcctaagcctgatgatatggagaaagttccgtattacaagttcccttctatggcctgctcatgaagctaatgaggagtatattgccaagtacaatctggcgattagtcgaatgaaagatcttgataagacacaacctttaaacccta

SEQ ID NO: 588 - DNA, 502 bp, Artificial
  Mutation introduced by TALE nuclease pair POT32_T02 within a POT32 allele
gcaagcttgtgcaatagttgtagtacatccctcaaaactccttttacttcttcctccacttctttaacttccactcctaaaccctctcaacttttcatccatggaaaacgtaaccaaatgttcaaagtttcatgcatggttaccaataataacggtgaccaaaaccaaaacgttgaaacgaattctgttgatcgaagaaatgttcttcttggcttaggtggtctttatggtgttgctaatgctataccattagctgcatccgctactccatctccacctcctgatctctcgtcttgtagtatagccaggattaacgaaactcatgtggtgccgtacagttgttgcgcgcctaagcctgatgatatggagaaagttccgtattacaagttcccttctatgactaagctccgtcagcctgctcatgaagctaatgaggagtatattgccaagtacaatttggcggttagcaagatgaggggatcttgataagacacaacctttt

SEQ ID NO: 589 - DNA, 423 bp, Artificial
  Mutation introduced by TALE nuclease pair POT32_T02 within a POT32 allele
  misc_feature (402): n is a or c or t or g
gcaagcttgtgcaatagtagtagtacatctctcaaaactccttttacttcttcctccacttctttaacttccactcctaaacccctctcaacttttcatccatggaaaacgtaaccaaatgttcaaagtttcatgcatgggtttcccaataataaacggtgccaaaaccaaaacgttgaaacgaattctgttgatcgaagaaatgttcttcttggcttaggtggtctttatggtgttgctaatgctataccattagctgcatccgctactccattctccacctcctgatctctcgtcttgtagtatagccaggattaacgaaactcatgtggtgccgtacagttgttgcgcgcctaagcctgatgatatggagaaagttctcagcctgctcagagctaatgnggagtatattgccaagtacaa

SEQ ID NO: 590 - DNA, 499 bp, Artificial
  Mutation introduced by TALE nuclease pair POT32_T02 within a POT32 allele
gcaagcttgtgcaatagtagtagtacatctctcaaaaactccttttacttcttcctccacttctttatcttccactcctaagccctctcaacttttcatccatggaaaacgtaaccaaatgttcaaagtttcatgcaaggttatcaataataacggtgaccaaaagcgttgaaacgaattctgttgatcgaagaaatgttcttcttggcttaggtggtctttatggtgttgctaatgctataccattagctgcatccgctgctccaactccacctcctgatctctcgtcttgtagtatagccaggattaacgaaaagtcaggtggtgccgtacagttgttgcgcgcctaagcctgatgatatggagaaagttccgtattacaagttcccttctatgacggtacgtggaggatgaaccagaccaggaacaaagcctgctcatgaagctaatgaggagtatattgccaagtacaatctggcgattagtcgaatgagagatc

SEQ ID NO: 591 - DNA, 506 bp, Artificial
  Mutation introduced by TALE nuclease pair POT32_T02 within a POT32 allele
ggcaagcttgtgcaatagtagtagtacatctctcaaaacatccttttacttcttcctccacttctttaacttccactcctaagcccctctcaacttttcatccatggaaaacgtaaccaaatgttcaaagtttcatgcaaggttaccaataataacggtgaccaaaaccaaaacgttgaaacgaattctgttgatcgaagaaatgttcttcttggcttaggtggtctttatggtgttgctaatgctataccattagctgcatccgctgctccagctccacctcctgatctctcgtcttgtagtatagccaggattaacgaaaatcaggtggtgccgtacagttgttgcgcgcctaagcctgatgatatggagaaagttccgtattacaagttcccttctatgactaagctccgtcagcctgctcatgaagctaatgaggagtatattgccaagtacaatctggcgattagtcgaatgaaagatcttgataagacacaacctttaaa

SEQ ID NO: 592 - DNA, 455 bp, Artificial
  Mutation introduced by TALE nuclease pair POT32_T02 within a POT32 allele
gcaagcttgtgcaatagtagtagtacatctctcaaaactccttttacttcttcctccacttctttaacttccactcctaagccctctcaacttttcatccatggaaaacgtaaccaaatgttcaaagtttcatgcaaggttaccaataataacggtggccaaaaccaaaacgttgaaacaaattctgttgatcgaagaaatgttcttcttggcttaggtggtctttatggtgttgctaatgctataccattagctgcatccgctgctccagctccacctcatgatctctcgtcttgtagtatagccaggattaacgaaaatcaggtggtgccgtacagttgttgcgcgcctaagcctgatgatatggagaaagttccgtattacaagttcccttctatgactaagctccgtctgcctgctcatgaagctaatgaggagtatattgccaagtacaa

SEQ ID NO: 593 - DNA, 518 bp, Artificial
  Mutation introduced by TALE nuclease pair POT32_T02 within a POT32 allele
gcaagcttgtgcaatagttgtagtacatccctcaaaactccttttacttcttcctccacttctttatcttccacctccataacgccctctcaacttttcatccatggaaaacgtaaccaaatgttcaaagtttcatgcaaggttaccaataataacggtgaccaaaaccaaaacgttgaaacgaattctgttgatcgaagaaatgttcttcttggcttaggtggtctttatggtgttgctaatgctataccattagctgcatccgctgctccagctccacctcctgatctctcgtcttgtagtatagccaggattaacgaaaatcaggtggtgccgtacagttgttgcgcgcctaagcctgatgatatggagaaagttccgtattacaagttcccttctatgactaagctccgtcagcctgctcatgaagctaatgaggagtatattgccaagtacaatttggcggttagcaagatgaggggatcttgataagacacaacctttaaaccctattggtt

SEQ ID NO: 594 - DNA, 451 bp, Artificial
  Mutation introduced by TALE nuclease pair POT32_T02 within a POT32 allele
gcaagcttgtgcaatagtagtagtacatctctcaaaactccttttacttcttcctccacttctttatcttccactcctaacgcctctcaacttttcatccatggaaaacgtaaccaaatgttcaaagtttcatgcagttgatcaataataacggtgaccaaaacagttgaaacgaattctgttgatcgaagaaatgttcttcttggcttaggtggtctttatggtgttgctaatgctataccattagctgcatccgctgctccactccacctcctgatctctcgtcttgtagtatagccaggattaacgaaatcagtggtgccgtacagttgttgcgcgcctaagcctgatgatatggagaaagttccgtattacaagttcccttctatgactaagctctgtcagcctgctcatgaagctaatgaggagtatattgccaagtacaattgcg

SEQ ID NO: 595 - DNA, 512 bp, Artificial
  Mutation introduced by TALE nuclease pair POT32_T02 within a POT32 allele
gcaagcttgtgcaatagtagtagtacatctctcaaaactccttttacttcttcctccacttctttatcttccactcctaagccctctcaacttttcatccatggaaaacgtaaccaaatgttcaaagtttcatgcaaggttaccaataataacggtgaccaaaaccaaaacgttgaaacaaattctgttgatcgaagaaatgttcttcttggcttaggtggtctttatggtgttgctaatgctataccattagctgcatccgctgctccagctccacctcctgatctctcgtcttgtagtatagccaggattaacgaaaatcaggtggtgccgtacagttgttgcgcgcctaagcctgatgatatggagaaagttccgtattacaagttcccttctatgactaagctccggcctgctcatgaagctaatgaggagtatattgccaagtacaatttggcggttagcaagatgaggggatcttgataagacacaacctttaaaccctattggtt

SEQ ID NO: 596 - DNA, 415 bp, Artificial
  Mutation introduced by TALE nuclease pair POT32_T02 within a POT32 allele
  misc_feature (222): n is a or c or t or g
gcaagcttgtgcaatagtagtagtacatctctcaaaactccttttacttcttcctccacttctttaacttccactcctaagcccctctcaacttttcatccatggaaaacgtaaccaaatgttcaaagtttcatgcaaggttaccaataataacggtgaccaaaaccaaaacgttgaaacgaattctgttggtcgcagaaatgtcatttcttgcttgagtgngcgttattgtggttgcttgcatgactattaccattagctacatccgctgctccagctccacctcctgatctctcgtcttgtagtatagccaggattaacgaaaatcaggtggtgccgtacagttgttgcgcgcctaagcctgatgatatggagaaagttccgtattacaagttcccttctatggcctgctcat

SEQ ID NO: 597 - DNA, 511 bp, Artificial
  Mutation introduced by TALE nuclease pair POT32_T02 within a POT32 allele
gcaagcttgttcaatagtagtagtacatctctcaaaactccttttacttcttcctccacttctttaacttccactcctaagcccctctcaacttttcatccatggaaaacgtaaccaaatgttcaaagtttcatgcaaggttaccaataataacggtgaccaaaaccaaaacgttgaaacgaattctgttgatcgaagaaatgttcttcttggcttaggtggtctttatggtgttgctaatgctataccattagctgcatccgctgctccagctccacctcctgatctctcgtcttgtagtatagccaggattaacgaaaatcaggtggtgccgtacagttgttgcgcgcctaagcctgatgatatggagaaagttccgtattacaagttcccttctatgactaagctcagcctgctcatgaagctaatgaggagtatattgccaagtacaatttggcggttagcaagatgagggatcttgataagacacaacctttaaaccctattggtt

SEQ ID NO: 598 - DNA, 513 bp, Artificial
  Mutation introduced by TALE nuclease pair POT32_T02 within a POT32 allele
gcaagcttgtgcaatagttgtagtacatccctcaaaactccttttacttcttcctccacttctttaacttccactcctaaaccctctcaacttttcatccatggaaaacgtaaccaaatgttcaaagtttcatgcatggttaccaataataacggtgaccaaaaccaaaacgttgaaacgaattctgttgatcgaagaaatgttcttcttggcttaggtggtctttatggtgttgctaatgctataccattagctgcatccgctgctccagctccacctcctgatctctcgtcttgtagtatagccaggattaacgaaaatcaggtggtgccgtacagttgttgcgcgcctaagcctgatgatatggagaaagttccgtattacaagttcccttctatgactaagctccgagcctgctcatgaagctaatgaggagtatattgccaagtacaatttggcggttagcaagatgaggggatcttgataagacacaacctttaaaccctattggtt

SEQ ID NO: 599 - DNA, 471 bp, Artificial
  Mutation introduced by TALE nuclease pair POT32_T02 within a POT32 allele
gcaagcttgttcaatagtagtagtacatctctcaaaactccttttacttcttcctccacttctttaacttccactcctaagccctctcaacttttcatccatggaaaacgtaaccaaatgttcaaagtttcatgcaaggttaccaataataacggtgaccaaaaccaaaacgttgaaacgaattctgttgatcgaagaaatgttcttcttggcttaggtggtctttatggtgttgctaatgctataccattagctgcatccgctgctccagctccacctcctgatctctcgtcttgtagtatagccaggattaacgaaaatcaggtggtgccgtacagttgttgcgcgcctaagcctgatgatatggagaaagttccgtattacaagttcccttctatgactaagctcagcctgctcatgaagctaatgaggagtatattgccaagtacaatttggcggttagcaagatga

SEQ ID NO: 600 - DNA, 493 bp, Artificial
  Mutation introduced by TALE nuclease pair POT32_T02 within a POT32 allele
gcaagcttgtgcaatagtagtagtacatctctcaaaactcctttttacttctttcctccacttctttaacttccactcctaagccccctctcaacttttcatccatggaaaacgtaaccaaatgttcaaagtttcatgcaaggttaccaataataacggtgaccaaaaccaaaacgttgaaacgaattctgttggtcgaagaaatgttcattctttggcttgaggtggtgctttcattggtgttgctaatgactataccattagctacatccgctgctccagctccacctcctgatctctcgtcttgtagtatagccaggattaacgaaaatcaggtggtgccgtacagttgttgcgcgcctaagcctgatgatatggagaaagttccgtattacaagttcccttctatggcctgctcatgaagctaattgaggagtatattgccaagtacaatctggcgattagtcgaatgaaagatcttgataagacacaa

SEQ ID NO: 601 - DNA, 556 bp, Artificial
  Mutation introduced by TALE nuclease pair POT32_T02 within a POT32 allele
gcaagcttgtgcaatagtagtagtacatctctcaaaactccttttacttcttcctccacttctttacttccactcctaagcccctctcaacttttcatccatggaaaacgtaaccaaatgttcaaagtttcatgcaaggttaccaataataacggtgaccaaaaccaaaacgttgaaacgaattctgttgatcgaagaaatgttcttcttggcttaggtggtctttatggtgttgctaatgctataccattagctgcatccgctgctccagctccacctcctgatctctcgtcttgtagtatagccaggattaacgaaaatcaggtggtgccgtacagttgttgcgcgcctaagcctgatgatatggagaaagttccgtattacaagttcccttctatgactaagctccgtgtcatcgataattaatacattgatcatctgttcgacctccgtcagcctgctcatgaagctaatgaggagtatattgccaagtacaatttggcggttagcaagatgagggatcttgataagacacaacctttaaaccctattggtt

SEQ ID NO: 602 - DNA, 540 bp, Artificial
  Mutation introduced by TALE nuclease pair POT32_T02 within a POT32 allele
gcaagcttgtgcaatagtagtagtacatctctcaaaactccttttacttcttcctccacttctttatcttccactcctaagcccctctcaacttttcatccatggaaaacgtaaccaaatgttcaaagtttcatgcaaggttatcaataataacggtgaccaaaacgttgaaacgaattctgttgatcgaagaaatgttcttcttggcttaggtggtctttatggtgttgctaatgctataccattagctgcatccgctgctccaactccacctcctgatctctcgtcttgtagtatagccaggattaacgaaaatcaggtggtgccgtacagttgttgcgcgcctaagcctgatgatatggagaaagttccgtattacaagttcccttctatgactaagctccgtggtcctgcaactttatccgcctccatccagtgttcgtcagcctgctcatgaagctaatgaggagtatattgccaagtacaatctggcgattagtcgaatgagagatcttgataagacacaacctttaaacccta

SEQ ID NO: 603 - DNA, 539 bp, Artificial
  Mutation introduced by TALE nuclease pair POT32_T02 within a POT32 allele
gcaagcttgtgcaatagtagtagtacatctctcaaaactccttttacttcttcctccacttctttatcttccactcctaagccctctcaacttttcatccatggaaaacgtaaccaaatgttcaaagtttcatgcaaggttatcaataataacggtgaccaaaacgttgaaacgaattctgttgatcgaagaaatgttcttcttggcttaggtggtctttatggtgttgctaatgctataccattagctgcatccgctgctccaactccacctcctgatctctcgtcttgtagtatagccaggattaacgaaaatcaggtggtgccgtacagttgttgcgcgcctaagcctgatgatatggagaaagttccgtattacaagttcccttctatgactaagctccgtggtcctgcaactttatccgcctccatccagtgttcgtcagcctgctcatgaagctaatgaggagtatattgccaagtacaatctggcgattagtcgaatgagagatcttgataagacacaacctttaaacccta

SEQ ID NO: 604 - DNA, 532 bp, Artificial
  Mutation introduced by TALE nuclease pair POT32_T02 within a POT32 allele
gcaagcttgtgcaatagtagtagtacatctctcaaaactccttttacttcttcctccacttctttatcttccactcctaagccctctcaacttttcatccatggaaaacgtaaccaaatgttcaaagtttcatgcaaggttatcaataataacggtgaccaaaacgttgaaacgaattctgttgatcgaagaaatgttcttcttggcttaggtggtctttatggtgttgctaatgctataccattagctgcatccgctgctccaactccacctcctgatctctcgtcttgtagtatagccaggattaacgaaaatcaggtggtgccgtacagttgttgcgcgcctaagcctgatgatatggagaaagttccgtattacaagttcccttctatgactaagctccgtgatcatgagcggagaattaaggggagtcgtcagcctgctcatgaagctaatgaggagtatattgccaagtacaatctggcgattagtcgaatgagagatcttgataagacacaacctttaaacccta

SEQ ID NO: 605 - DNA, 628 bp, Artificial
  Mutation introduced by TALE nuclease pair POT32_T02 within a POT32 allele
gcaagcttgtgcaatagttgtagtacatctctcaaaactccttttacttcttcctccacttctttaacttccactcctaaaccctctcaacttttcatccatggaaaacgtaaccaaatgttcaaagtttcatgcaaggttaccaataataacggtgaccaaaaccaaaacgttgaaacgaattctgttgatcgaagaaatgttcttcttggcttaggtggtctttatggtgttgctaatgctataccattagctgcatccgctactccatctccacctcctgatctctcgtcttgtagtatagccaggattaacgaaactcatgtggtgccgtacagttgttgcgcgcctaagcctgatgatatggagaaagttccgtattacaagttcccttctatgactaagctccggggcggagcctatggaaaacgccagcaacgcggcctttttacggttcctggccttttgctggccttttgctcacatgttctttcctgcgttatccctgattctgtggataaccgtattcgtcagcctgctcatgaagctaatgaggagtatattgccaagtacaatttggcggttagcaagatgagggatcttgataagacacaacctttaaacccta

SEQ ID NO: 606 - DNA, 554 bp, Artificial
  Mutation introduced by TALE nuclease pair POT32_T02 within a POT32 allele
gcaagcttgtgcaatagtagtagtacatctctcaaaactccttttacttcttcctccacttctttatcttccactcctaagccctctcaacttttcatccatggaaaacgtaaccaaatgttcaaagtttcatgcaaggttaccaataataacggtgaccaaaaccaaaacgttgaaacaaattctgttgatcgaagaaatgttcttcttggcttaggtggtctttatggtgttgctaatgctataccattagctgcatccgctgctccagctccacctcctgatctctcgtcttgtagtatagccaggattaacgaaaatcaggtggtgccgtacagttgttgcgcgcctaagcctgatgatatggagaaagttccgtattacaagttcccttctatgactaagctccggcacagcaccggcaacagccgctggaccgtctccagcgcctgcttgccaccacgtcagcctgctcatgaagctaatgaggagtatattgccaagtacaatttggcggttagcaagatgagggatcttgataagacacaaccttt

SEQ ID NO: 607 - DNA, 566 bp, Artificial
  Mutation introduced by TALE nuclease pair POT32_T02 within a POT32 allele
gcaagcttgtgcaatagttgtagtacatccctcaaaactccttttacttcttcctccacttctttaacttccactcctaaaccctctcaacttttcatccatggaaaacgtaaccaaatgttcaaagtttcatgcatggttaccaataataacggtgaccaaaaccaaaacgttgaaacgaattctgttgatcgaagaaatgttcttcttggcttaggtggtctttatggtgttgctaatgctataccattagctgcatccgctactccatctccacctcctgatctctcgtcttgtagtatagccaggattaacgaaactcatgtggtgccgtacagttgttgcgcgcctaagcctgatgatatggagaaagttccgtattacaagttcccttctatgactaagctccgaactcacgttaaggggattttggtcatgagattaagtaagttggccgcagtgttatcactcatggttcgtcagcctgctcatgaagctaatgaggagtatattgccaagtacaatctggcgattagtcgaatgaaagatcttgataagacacaacc

SEQ ID NO: 608 - DNA, 542 bp, Artificial
  Mutation introduced by TALE nuclease pair POT32_T02 within a POT32 allele
gcaagcttgtgcaatagtagtagtacatctctcaaaactccttttacttcttcctccacttctttaacttccactcctaagccctctcaacttttcatccatggaaaacgtaaccaaatgttcaaagtttcatgcaaggttaccaataataacggtgaccaaaaccaaaacgttgaaacgaattctgttgatcgaagaaatgttcttcttggcttaggtggtctttatggtgttgctaatgctataccattagctgcatccgctgctccagctccacctcctgatctctcgtcttgtagtatagccaggattaacgaaaatcaggtggtgccgtacagttgttgcgcgcctaagcctgatgatatggagaaagttccgtattacaagttcccttctatgactaagctccgtggtaatatccggaaacctcctcggattccttcgtcagcctgctcatgaagctaatgaggagtatattgccaagtacaatctggcgattagtcgaatgaaagatcttgataagacacaacctttaaacccta

SEQ ID NO: 609 - DNA, 547 bp, Artificial
  Mutation introduced by TALE nuclease pair POT32_T02 within a POT32 allele
gcaagcttgtgcaatagtagtagtacatctctcaaaactccttttacttcttcctccacttctttatcttccactcctaagcccctctcaacttttcatccatggaaaacgtaaccaaatgttcaaagtttcatgcaaggttatcaataataacggtgaccaaaacgttgaaacgaattctgttgatcgaagaaatgttcttcttggcttaggtggtctttatggtgttgctaatgctataccattagctgcatccgctgctccaactccacctcctgatctctcgtcttgtagtatagccaggattaacgaaaatcaggtggtgccgtacagttgttgcgcgcctaagcctgatgatatggagaaagttccgtattacaagttcccttctatgactaagctccgctgataaatctggagacggtgagcgtgggtctcgcgcgtcagcctgctcatgaagctaatgaggagtatattgccaagtacaatctggcgattagtcgaatgaaagatcttgataagacacaacctttaaaccctattggtt

SEQ ID NO: 610 - DNA, 594 bp, Artificial
  Mutation introduced by TALE nuclease pair POT32_T02 within a POT32 allele
gcaagcttgtgcaatagtagtagtacatctctcaaaactccttttacttcttcctccacttctttaacttccactcctaagccctctcaacttttcatccatggaaaacgtaaccaaatgttcaaagtttcatgcaaggttaccaataataacggtgaccaaaaccaaaacgttgaaacgaattctgttgatcgaagaaatgttcttcttggcttaggtggtctttatggtgttgctaatgctataccattagctgcatccgctgctccagctccacctcctgatctctcgtcttgtagtatagccaggattaacgaaaatcaggtggtgccgtacagttgttgcgcgcctaagcctgatgatatggagaaagttccgtattacaagttcccttctatgactaagctccggctggcgatggccaccacctgctggggggtcaagccgtggggcctggcacagcaccggcaacagcgcctgcaccgtctccagcgcctgcttcgtcagcctgctcatgaagctaatgaggagtatattgcccaagtacaatctggcgattagtcgaatgaaagatcttgataagacacaaccttt

SEQ ID NO: 611 - DNA, 511 bp, Artificial; identical to SEQ ID NO: 210
  Mutation introduced by TALE nuclease pair POT32_T02 within a POT32 allele

SEQ ID NO: 612 - DNA, 539 bp, Artificial
  Mutation introduced by TALE nuclease pair POT32_T02 within a POT32 allele
gcaagcttgtgcaatagtagtagtacatctctcaaaactccttttacttcttcctccacttctttatcttccactcctaagccctctcaacttttcatccatggaaaacgtaaccaaatgttcaaagtttcatgcaaggttaccaataataacggtgaccaaaaccaaaacgttgaaacaaattctgttgatcgaagaaatgttcttcttggcttaggtggtctttatggtgttgctaatgctataccattagctgcatccgctgctccagctccacctcctgatctctcgtcttgtagtatagccaggattaacgaaactcatgtggtgccgtacagttgttgcgcgcctaagcctgatgatatggagaaagttccgtattacaagttcccttctatgactaagctccgattggatcggatcccgggcccgtcgactgtcagcctgctcatgaagctaatgaggagtatattgccaagtacaatctggcgattagtcgaatgaaagatcttgataagacacaacctttaaaccctatt

SEQ ID NO: 613 - DNA, 616 bp, Artificial
  Mutation introduced by TALE nuclease pair POT32_T02 within a POT32 allele
gcaagcttgtgcaatagtagtagtacatctctcaaaactccttttacttcttcctccacttctttatcttccactcctaagcccctctcaacttttcatccatggaaaacgtaaccaaatgttcaaagtttcatgcaaggttaccaataataacggtgaccaaaaccaaaacgttgaaacgaattctgttgatcgaagaaatgttcttcttggcttaggtggtctttatggtgttgctaatgctataccattagctgcatccgctgctccagctccacctcctgatctctcgtcttgtagtatagccaggattaacgaaaatcaggtggtgccgtacagttgttgcgcgcctaagcctgatgatatggagaaagttccgtattacaagttcccttctatgactaagctccgtggcgacgaggtggtcgttggtcaacgcggccaacgccggatcagggcgagataactgggcaacaatgctctccagcgccggcctgccgccgccattgctggcgatggccaccacctgctgagggtcaagccgttcgtcagcctgctcatgaagctaatgaggagtatattgccaagtacaatttggcggttagcaagatgaggg

SEQ ID NO: 614 - DNA, 539 bp, Artificial
  Mutation introduced by TALE nuclease pair POT32_T02 within a POT32 allele
gcaagcttgtgcaatagtagtagtacatctctcaaaactccttttacttcttcctccacttctttatcttccactcctaagccctctcaacttttcatccatggaaaacgtaaccaaatgttcaaagtttcatgcaaggttaccaataataacggtgaccaaaaccaaaacgttgaaacaaattctgttgatcgaagaaatgttcttcttggcttaggtggtctttatggtgttgctaatgctataccattagctgcatccgctgctccagctccacctcctgatctctcgtcttgtagtatagccaggattaacgaaaatcaggtggtgccgtacagttgttgcgcgcctaagcctgatgatatggagaaagttccgtattacaagttcccttctatgactaagctccgtgtggctgttgccggtgctgtgccaggcccgtcagcctgctcatgaagctaatgaggagtatattgccaagtacaatctggcgattagtcgaatgaaagatcttgataagacacaacctttaaacccta

SEQ ID NO: 615 - DNA, 555 bp, Artificial
  Mutation introduced by TALE nuclease pair POT32_T02 within a POT32 allele
gcaagcttgtgcaatagtagtagtacatctctcaaaactccttttacttcttcctccacttctttatcttccactcctaagccctttcaacttttcatccatggaaaacgtaaccaaatgttcaaagtttcatgcaaggttaccaataataacggtgaccaaaaccaaaacgttgaaacaaattctgttgatcgaagaaatgttcttcttggcttaggtggtctttatggtgttgctaatgctataccattagctgcatccgctgctccagctccacctcctgatctctcgtcttgtagtatagccaggattaacgaaaatcaggtggtgccgtacagttgttgcgcgcctaagcctgatgatatggagaaagttccgtattacaagttcccttctatgactccagcgcctgcttgccaccgccattgctggcgatggccaccacctgctgggggggtcaagccgtgagcctgctcatgaagctaatgaggagtatattgccaagtacaatctggcgattagtcgaatgaaagatcttgataagacacaaccttt

SEQ ID NO: 616 - DNA, 635 bp, Artificial
  Mutation introduced by TALE nuclease pair POT32_T02 within a POT32 allele
gcaagcttgtgcaatagtagtagtacatctctcaaaactccttttacttcttcctccacttctttatcttccactcctaagcccctctcaacttttcatccatggaaaacgtaaccaaatgttcaaagtttcatgcaaggttaccaataataacggtgaccaaaaccaaaacgttgaaacgaattctgttgatcgaagaaatgttcttcttggcttaggtggtctttatggtgttgctaatgctataccattagctgcatccgctgctccagctccacctcctgatctctcgtcttgtagtatagccaggattaacgaaaatcaggtggtgccgtacagttgttgcgcgcctaagcctgatgatatggagaaagttccgtattacaagttcccttctatgactaagctccgtggcgacgaggtggtcgttggtcaacgcggccaacgccggatcagggcgagataactgggcaacaatgctctccagcgccggcctgccgccgccattgctggcgatggccaccacctgctgaggggtcaagccgttcgtcagcctgctcatgaagctaatgaggagtatattgccaagtacaatttgggcggttagcaagatgagggatcttgataagacacaa

SEQ ID NO: 617 - DNA, 526 bp, Artificial
  Mutation introduced by TALE nuclease pair POT32_T02 within a POT32 allele
gcaagcttgtgcaatagtagtagtacatctctcaaaactccttttacttcttcctccacttctttatcttccactcctaagccctctcaacttttcatccatggaaaacgtaaccaaatgttcaaagtttcatgcaaggttaccaataataacggtgaccaaaaccaaaacgttgaaacaaattctgttgatcgaagaaatgttcttcttggcttaggtggtctttatggtgttgctaatgctataccattagctgcatccgctgctccagctccacctcctgatctctcgtcttgtagtatagccaggattaacgaaaatcaggtggtgccgtacagttgttgcgcgcctaagcctgatgatatggagaaagttccgtattacaagttcccttctatgactaagctccgtgtggctgttgccggtgctgtgccaggcccgtcagcctgctcatgaagctaatgaggagtatattgccaagtacaatctggcgattagtcgaatgaaagatcttgataagacacaa

SEQ ID NO: 618 - DNA, 532 bp, Artificial
  Mutation introduced by TALE nuclease pair POT32_T02 within a POT32 allele
  misc_feature (159): n is a or c or t or g
gcaagcttgtgcaatagtagtagtacatctctcaaaactccttttacttcttcctccacttctttatcttccactcctaagcccctctcaacttttcatccatggaaaacgtaaccaaatgttcaaagtttcatgcaaggttatcaataataacggtgnccaaaacgttgaaacgaattctgttgatcgaagaaatgttcttcttggcttaggtggtctttatggtgttgctaatgctataccattagctgcatccgctgctccaactccacctcctgatctctcgtcttgtagtatagccaggattaacgaaaatcaggtggtgccgtacagttgttgcgcgcctaagcctgatgatatggagaaagttccgtattacaagttcccttctatgactaagctccgtgatcatgagcggagaattaaggggagtcgtcagcctgctcatgaaagctaatgaggagtatattgccaagtacaatctggcgatagtcgaatgagagatcttgataagacacaacctttaaaccct

SEQ ID NO: 619 - DNA, 531 bp, Artificial
  Mutation introduced by TALE nuclease pair POT32_T02 within a POT32 allele
gcaagcttgtgcaatagtagtagtacatctctcaaaactccttttacttcttcctccacttctttatcttccactcctaagccctctcaacttttcatccatggaaaacgtaaccaaatgttcaaagtttcatgcaaggttatcaataataacggtgaccaaaacgttgaaacgaattctgttgatcgaagaaatgttcttcttggcttaggtggtctttatggtgttgctaatgctataccattagctgcatccgctgctccaactccacctcctgatctctcgtcttgtagtatagccaggattaacgaaaatcaggtggtgccgtacagttgttgcgcgcctaagcctgatgatatggagaaagttccgtattacaagttcccttctatgactaagctccgtgatcatgagcggagaattaaggggagtcgtcagcctgctcatgaagctaatgaggagtatattgccaagtacaatctggcgatagtcgaatgagagatcttgataagacacaacctttaaacccta

SEQ ID NO: 620 - DNA, 569 bp, Artificial
  Mutation introduced by TALE nuclease pair POT32_T02 within a POT32 allele
gcaagcttgtgcaatagtattagtacatctctcaaaactccttttacttcttcctccacttctttaacttccactcctaagccctctcaacttttcatccatggaaaacgtaaccaaatgttcaaagtttcatgcaaggttaccaataataacggtgaccaaaaccaaaacgttgaaacgaattctgttgatcgaagaaatgttcttcttggcttaggtggtctttatggtgttgctaatgctataccattagctgcatccgctgctccagctccacctcctgatctctcgtcttgtagtatagccaggattaacgaaaatcaggtggtgccgtacagttgttgcgcgcctaagcctgatgatatggagaaagttccgtattacaagttcccttctatgacagcccacggcttgacccctcagcaggtggtggcatcgccagcaatggcggcggcaggccggcgctggagagcattgttgcccaagttatctcgcgtcagcctgctcatgaagctaatgaggagtatattgccaagtacaatctggcgattagtcgaatgaaagatctt

SEQ ID NO: 621 - DNA, 522 bp, Artificial
  Mutation introduced by TALE nuclease pair POT32_T02 within a POT32 allele
gcaagcttgtgcaatagtagtagtacatctctcaaaactccttttacttcttcctccacttctttaacttccactcctaagccctctcaacttttcatccatggaaaacgtaaccaaatgttcaaagtttcatgcaaggttaccaataataacggtgaccaaaaccaaaacgttgaaacgaattctgttgatcgaagaaatgttcttcttggcttaggtggtctttatggtgttgctaatgctataccattagctgcatccgctgctccagctccacctcctgatctctcgtcttgtagtatagccaggattaacgaaaatcaggtggtgccgtacagttgttgcgcgcctaagcctgatgatatggagaaagttccgtattacaagttcccttctatgactaagctccgatctcagcgatctgtctatttcgttcgtcagcctgctcatgaagctaatgaggagtatattgccaagtacaatctggcgattagtcgaatgaaagatcttgataagacacaa

SEQ ID NO: 622 - DNA, 541 bp, Artificial
  Mutation introduced by TALE nuclease pair POT32_T02 within a POT32 allele
gcaagcttgtgcaatagtagtagtacatctctcaaaactccttttacttcttcctccacttctttatcttccactcctaagcccctctcaacttttcatccatggaaaacgtaaccaaatgttcaaagtttcatgcaaggttaccaataataacggtgaccaaaaccaaaacgttgaaacaaattctgttgatcgaagaaatgttcttcttggcttaggtggtctttatggtgttgctaatgctataccattagctgcatccgctgctccagctccacctcctgatctctcgtcttgtagtatagccaggattaacgaaaatcaggtggtgccgtacagttgttgcgcgcctaagcctgatgatatggagaaagttccgtattacaagttcccttctatgactaagctccgtccgggcaagagcaactcggtcgccgcatacgtcagcctgctcatgaagctaatgaggagtatattgccaagtacaatctggcgattagtcgaatgaaagatcttgataagacacaacctttaaacccta

SEQ ID NO: 623 - DNA, 603 bp, Artificial
  Mutation introduced by TALE nuclease pair POT32_T02 within a POT32 allele
gcaagcttgtgcaatagtagtagtacatctctcaaaactccttttacttcttcctccacttctttaacttccactcctaagccctctcaacttttcatccatggaaaacgtaaccaaatgttcaaagtttcatgcaaggttaccaataataacggtgaccaaaaccaaaacgttgaaacgaattctgttgatcgaagaaatgttcttcttggcttaggtggtctttatggtgttgctaatgctataccattagctgcatccgctgctccagctccacctcctgatctctcgtcttgtagtatagccaggattaacgaaaatcaggtggtgccgtacagttgttgcgcgcctaagcctgatgatatggagaaagttccgtattacaagttcccttctatgactaagctccgtgttgccggtgctgtgccaggcccacggcttgacccccagcaggtggtggccatcgccgacaacgatcggaggaccgaaggagctaaccgctttgtcagcctgctcatgaagctaatgaggagtatattgccaagtacaatctggcgattagtcgaatgaaagatcttgataagacacaacctttaaacccta

SEQ ID NO: 624 - DNA, 545 bp, Artificial
  Mutation introduced by TALE nuclease pair POT32_T02 within a POT32 allele
  misc_feature (151); (154): n is a or c or t or g
gcaagcttgtgcaatagtagtagtacatcctctaaaactccttttacttcttcctccacttctttatcttccactcctaacgcctctcaacttttcatccatggaaaacgtaaccaaatgttcaaagtttcatgcagttgctatcaataanagngcgaaccaaaacagttgaaacgaattctgttgatcgaagaaatgttcttcttggcttaggtggtctttatggtgttgctaatgctataccattagctgcatccgctgctccagctccacctcctgatctctcgtcttgtagtatagccaggattaacgaaaatcaggtggtgccgtacagttgttgcgcgcctaagcctgatgatatggagaaagttccgtattacaagttcccttctatgactaagctccgtggaacaggagagcgcacgaggggagcttccagggggttcgtcagcctgctcatgaagctaatgaggagtatattgccaagtacaatttggcggttagcaagatgagggatcttgataagacacaacctttaaacccta

SEQ ID NO: 625 - DNA, 554 bp, Artificial
  Mutation introduced by TALE nuclease pair POT32_T02 within a POT32 allele
gcaagcttgtgcaatagtagtagtacatctctcaaaactccttttacttcttcctccacttctttatcttccactcctaagccctctcaacttttcatccatggaaaacgtaaccaaatgttcaaagtttcatgcaaggttaccaataataacggtgaccaaaaccaaaacgttgaaacaaattctgttgatcgaagaaatgttcttcttggcttaggtggtctttatggtgttgctaatgctataccattagctgcatccgctgctccagctccacctcctgatctctcgtcttgtagtatagccaggattaacgaaaatcaggtggtgccgtacagttgttgcgcgcctaagcctgatgatatggagaaagttccgtattacaagttcccttctatgactaagctccgggcacagcaccggcaacagccgctggaccgtctccagcgcctgcttcgtcagcctgctcatgaagctaatgaggagtatattgccaagtacaatctggcgattagtcgaatgaaagatcttgataagacacaacctttaaaccc

SEQ ID NO: 626 - DNA, 533 bp, Artificial
  Mutation introduced by TALE nuclease pair POT32_T02 within a POT32 allele
gcaagcttgtgcaatagtagtagtacatctctcaaaactccttttacttcttcctccacttctttatcttccactcctaagcccctctcaacttttcatccatggaaaacgtaaccaaatgttcaaagtttcatgcaaggttatcaataataacggtgaccaaaacgttgaaacgaattctgttgatcgaagaaatgttcttcttggcttaggtggtctttatggtgttgctaatgctataccattagctgcatccgctgctccaactccacctcctgatctctcgtcttgtagtatagccaggattaacgaaaatcaggtggtgccgtacagttgttgcgcgcctaagcctgatgatatggagaaagttccgtattacaagttcccttctatgactaagctccgtgatcatgagcggagaattaaggggagtcgtcagcctgctcatgaagctaatgaggagtatattgccaagtacaatctggcgattagtcgaatgagagatcttgataagacacaacctttaaacccta

SEQ ID NO: 627 - DNA, 459 bp, Artificial
  Mutation introduced by TALE nuclease pair POT32_T02 within a POT32 allele
gcaagcttgtgcaatagtagtagtacatctctcaaaactccttttacttcttcctccacttctttatcttccactcctaagccctctcaacttttcatccatggaaaacgtaaccaaatgttcaaagtttcatgcaaggttaccaataataacggtgaccaaaaccaaaacgttgaaacaaaattctgttgatcgaagaaatgttcttcttggcttaggtggtctttatggtgttgctaatgctataccattagctgcatccgctgctccagctccacctcctgatctctcgtcttgtagtatagccaggatttaacgaaaatcaggtggtgccgtacagttgttgcgcgcctaagcctgatgatatggagaaagttccgtattacaagttcccttctatgactaagctccgtgtggctgttgccggtgctgtgccaggcccgtcagcctgctcatgaa

SEQ ID NO: 628 - DNA, 580 bp, Artificial
  Mutation introduced by TALE nuclease pair POT32_T02 within a POT32 allele
gcaagcttgtgcaatagtagtagtacatctctcaaaactccttttacttcttcctccacttctttatcttccactcctaagcccctctcaacttttcatccatggaaaacgtaaccaaatgttcaaagtttcatgcaaggttaccaataataacggtgaccaaaaccaaaacgttgaaacaaaattctgttgatcgaagaaatgttcttcttggcttaggtggtctttatggtgttgctaatgctataccattagctgcatccgctgctccagctccacctcctgatctctcgtcttgtagtatagccaggattaacgaaaatcaggtggtgccgtacagttgttgcgcgcctaagcctgatgatatggagaaagttccgtattacaagttcccttctatgactaagctctccagcgcctgcttgccgccatcgtggctggcgatggccaccacctgctccgggggtcaagccgtgggccttcgtcagcctgctcatgaagctaatgagggagtatattgccaagtcaatctggcgattagtcgaatgaaagatcttgataagacacaacctttaaaccc

SEQ ID NO: 629 - DNA, 562 bp, Artificial
  Mutation introduced by TALE nuclease pair POT32_T02 within a POT32 allele
gcaagcttgtgcaatagtagtagtacatctctcaaaactccttttacttcttcctccacttctttacttccactcctaagccctctcaacttttcatccatggaaaacgtaaccaaatgttcaaagtttcatgcaaggttaccaataataacggtgaccaaaaccaaaacgttgaaacgaattctgttgatcgaagaaatgttcttcttggcttaggtggtctttatggtgttgctaatgctataccattagctgcatccgctgctccagctccacctcctgatctctcgtcttgtagtatagccaggattaacgaaaatcaggtggtgccgtacagttgttgcgcgcctaagcctgatgatatggagaaagttccgtattacaagttcccttctatgactaagctccgtgttctcccgagaggtcacaattgccgcgagcaaagatattaatgttcgtcagcctgctcatgaagctaatgaggagtatattgccaagtacaatctggcgattagtcgaatgaaagatcttgataagacacaacctttaaaccctattggtt

SEQ ID NO: 630 - DNA, 544 bp, Artificial
  Mutation introduced by TALE nuclease pair POT32_T02 within a POT32 allele
gcaagcttgtgcaatagtagtagtacatctctcaaaactccttttacttcttcctccacttctttacttccactcctaagcccctctcaacttttcatccatggaaaacgtaaccaaatgttcaaagtttcatgcaaggttaccaataataacggtgaccaaaaccaaaacgttgaaacgaattctgttgatcgaagaaatgttcttcttggcttaggtggtctttatggtgttgctaatgctataccattagctgcatccgctgctccagctccacctcctgatctctcgtcttgtagtatagccaggattaacgaaaatcaggtggtgccgtacagttgttgcgcgcctaagcctgatgatatggagaaagttccgtattacaagttcccttctatgactaagctccgtgttctcccgagaggtcacaattgccgcgagcaaagatattaatgttcgtcagcctgctcatgaagctaatgaggagtatattgccaagtacaatctggcgattagtcgaatgaaagatcttgataagacacaa

SEQ ID NO: 631 - DNA, 602 bp, Artificial
  Mutation introduced by TALE nuclease pair POT32_T02 within a POT32 allele
gcaagcttgtgcaatagtagtagtacatctctcaaaactccttttacttcttcctccacttctttaacttccactcctaagccctctcaacttttcatccatggaaaacgtaaccaaatgttcaaagtttcatgcaaggttaccaataataacggtgaccaaaaccaaaacgttgaaacgaattctgttgatcgaagaaatgttcttcttggcttaggtggtctttatggtgttgctaatgctataccattagctgcatccgctgctccagctccacctcctgatctctcgtcttgtagtatagccaggattaacgaaaatcaggtggtgccgtacagttgttgcgcgcctaagcctgatgatatggagaaagttccgtattacaagttcccttctatgactaagctccggctggcgatggccaccacctgctggggggtcaagccgtggggcctggcacagcaccggcaacagcgcctgcaccgtctccagcgcctgcttcgtcagcctgctcatgaagctaatgaggagtatattgcccaagtacaatctggcgattagtcgaatgaaagatcttgataagacacaacctttaaacccta

SEQ ID NO: 632 - DNA, 615 bp, Artificial
  Mutation introduced by TALE nuclease pair POT32_T02 within a POT32 allele
gcaagcttgtgcaatagtagtagtacatctctcaaaactccttttacttcttcctccacttctttatcttccactcctaagccctctcaacttttcatccatggaaaacgtaaccaaatgttcaaagtttcatgcaaggttaccaataataacggtgaccaaaaccaaaacgttgaaacaaattctgttgatcgaagaaatgttcttcttggcttaggtggtctttatggtgttgctaatgctataccattagctgcatccgctgctccagctccacctcctgatctctcgtcttgtagtatagccaggattaacgaaaatcaggtggtgccgtacagttgttgcgcgcctaagcctgatgatatggagaaagttccgtattacaagttcccttctatgactaagctccgtttaatcagtgaggcacctatctcagcgatctgtctatttcgttcatccatagttgcgatgacaccgcgcgcgataatttatcctagtttgcgcgctatattttgttcgtcagcctgctcatgaagctaatgaggagtatattgccaagtacaatctggcgattagtcgaatgaaagatcttgataagacacaacctttaaaccc

SEQ ID NO: 633 - DNA, 539 bp, Artificial
  Mutation introduced by TALE nuclease pair POT32_T02 within a POT32 allele
gcaagcttgtgcaatagttgtagtacatctctcaaaactccttttacttcttcctccacttctttaacttccactcctaaaccctctcaacttttcatccatggaaaacgtaaccaaatgttcaaagtttcatgcaaggttaccaataataacggtgaccaaaaccaaaacgttgaaacgaattctgttgatcgaagaaatgttcttcttggcttaggtggtctttatggtgttgctaatgctataccattagctgcatccgctactccatctccacctcctgatctctcgtcttgtagtatagccaggattaacgaaactcatgtggtgccgtacagttgttgcgcgcctaagcctgatgatatggagaaagttccgtattacaagttcccttctatgactaagctccgtgataccgctcgccgcagccgaacgaccgactcagcctgctcatgaagctaatgaggagtatattgccaagtacaatctggcgattagtcgaatgaaagatcttgataagacacaacctttaaacccta

SEQ ID NO: 634 - DNA, 578 bp, Artificial
  Mutation introduced by TALE nuclease pair POT32_T02 within a POT32 allele
gcaagcttgtgcaatagtagtagtacatctctcaaaactccttttacttcttcctccacttctttatcttccactcctaagcccctctcaacttttcatccatggaaaacgtaaccaaatgttcaaagtttcatgcaaggttatcaataataacggtgaccaaaacgttgaaacgaattctgttgatcgaagaaatgttcttcttggcttaggtggtctttatggtgttgctaatgctataccattagctgcatccgctgctccaactccacctcctgatctctcgtcttgtagtatagccaggattaacgaaaatcaggtggtgccgtacagttgttgcgcgcctaagcctgatgatatggagaaagttccgtattacaagttcccttctatgactaagctccgtgggtttttattgattagagtcccgcaattatacatttaatacgcgatagtaaaacaaaattatagcgcagcctgctcatgaagcataatgaggagtatattgccaagtacaatctggcgattagtcgaatgagagatcttggataagacacaacctttaaaccctattggtt

SEQ ID NO: 635 - DNA, 552 bp, Artificial
  Mutation introduced by TALE nuclease pair POT32_T02 within a POT32 allele
gcaagcttgtgcaatagtagtagtacatctctcaaaactccttttacttcttcctccacttctttaacttccactcctaagcccctctcaacttttcatccatggaaaacgtaaccaaatgttcaaagtttcatgcaaggttaccaataataacggtgaccaaaaccaaaacgttgaaacgaattctgttgatcgaagaaatgttcttcttggcttaggtggtctttatggtgttgctaatgctataccattagctgcatccgctgctccagctccacctcctgatctctcgtcttgtagtatagccaggattaacgaaaatcaggtggtgccgtacagttgttgcgcgcctaagcctgatgatatggagaaagttccgtattacaagttcccttctatgactaagctccgtgggcctggcacagcaccggcaacagccgctggaccgtctcccgtcagcctgctcatgaagctaatgaggagtatattgccaagtacaatctggcgattagtcgaatgaaagatcttgataagacacaacctttaaaccct

SEQ ID NO: 636 - DNA, 559 bp, Artificial
  Mutation introduced by TALE nuclease pair POT32_T02 within a POT32 allele
gcaagcttgtgcaatagtagtagtacatctctcaaaactccttttacttcttcctccacttctttaacttccactcctaagccctctcaacttttcatccatggaaaacgtaaccaaatgttcaaagtttcatgcaaggttaccaataataacggtgaccaaaaccaaaacagttgaaacgaattctgttgatcgaagaaatgttcttcttggcttaggtggtctttatggtgttgctaatgctataccattagctgcatccgctgctccagctccacctcctgatctctcgtcttgtagtatagccaggattaacgaaaatcaggtggtgccgtacagttgttgcgcgcctaagcctgatgatatggagaaagttccgtattacaagttcccttctatgactaagctccgtgggcctggcacagcaccggcaacagccgctggaccgtctcccgtcagcctgctcatgaagctaatgaggagtatattgccaagtacaatctggcgattagtcgaatgaaagatcttgataagacacaacctttaaaccctattggtt

SEQ ID NO: 637 - DNA, 583 bp, Artificial
  Mutation introduced by TALE nuclease pair POT32_T02 within a POT32 allele
gcaagcttgtgcaatagtagtagtacatctctcaaaactccttttacttcttcctccacttctttatcttccactcctaagcccctctcaacttttcatccatggaaaacgtaaccaaatgttcaaagtttcatgcaaggttaccaataataacggtgaccaaaaccaaaacgttgaaacgaattctgttgatcgaagaaatgttcttcttggcttaggtggtctttatggtgttgctaatgctataccattagctgcatccgctgctccagctccacctcctgatctctcgtcttgtagtatagccaggattaacgaaaatcaggtggtgccgtacagttgttgcgcgcctaagcctgatgatatggagaaagttccgtattacaagttcccttctatgactaagctccgtggcgacgaggtggtcgttggtcaacgcggccaacgccggatcagggcgagataactgggcaacaatgctctccagcgccggcctgccgccgccattgctggcgatggccaccacctgctgagggtcaagccgttcgtcagcctgctcatgaagctaatgaggagtatattg

SEQ ID NO: 638 - DNA, 618 bp, Artificial
  Mutation introduced by TALE nuclease pair POT32_T02 within a POT32 allele
gcaagcttgtgcaatagtagtagtacatctctcaaaactccttttacttcttcctccacttctttatcttccactcctaagcccctctcaacttttcatccatggaaaacgtaaccaaatgttcaaagtttcatgcaaggttatcaataataacggtgaccaaaacgttgaaacgaattctgttgatcgaagaaatgttcttcttggcttaggtggtctttatggtgttgctaatgctataccattagctgcatccgctgctccaactccacctcctgatctctcgtcttgtagtatagccaggattaacgaaaatcaggtggtgccgtacagttgttgcgcgcctaagcctgatgatatggagaaagttccgtattacaagttcccttctatgactaagctccgtcgtacttcagcttgtgcctcaactcggatttcttctcctccagctcggacttcaccgcgggtttctggagtttaatgagctgttgccggtgctgtgccaggcccacggcttgacccgtcagctgctcatgaagctaatgaggagtatattgccaagtacaatctggcgattagtcgaatgagagatcttgataagacacaacctttaaaccc

SEQ ID NO: 639 - DNA, 573 bp, Artificial
  Mutation introduced by TALE nuclease pair POT32_T02 within a POT32 allele
gcaagcttgtgcaatagtagtagtacatctctcaaaactccttttacttcttcctccacttctttaacttccactcctaaaccctctcaacttttcatccatggaaaacgtaaccaaatgttcaaagtttcatgcaaggttaccaataataacggtgaccaaaaccaaaacgttgaaacgaattctgttgatcgaagaaatgttcttcttggcttaggtggtctttatggtgttgctaatgctataccattagctgcatccgctactccatctccacctcctgatctctcgtcttgtagtatagccaggattaacgaaactcatgtggtgccgtacagttgttgcgcgcctaagcctgatgatatggagaaagttccgtattacaagttcccttctatgactaagctccgtgtaagtagttcgccagttaatagtttgcgcaacgttgttgccattgctacaggcatcgtagtgtcacgcctgctcatgaagctaatgaggagtatattgccaagtacaatctggcgattagtcgaatgaaagatcttgataagacacaacctttaaacccta

SEQ ID NO: 640 - DNA, 541 bp, Artificial
  Mutation introduced by TALE nuclease pair POT32_T02 within a POT32 allele
gcaagcttgtgcaatagtagtagtacatctctcaaaactccttttacttcttcctccacttctttatcttccactcctaagcccctctcaacttttcatccatggaaaacgtaaccaaatgttcaaagtttcatgcaaggttatcaataataacggtgaccaaaacgttgaaacgaattctgttgatcgaagaaatgttcttcttggcttaggtggtctttatggtgttgctaatgctataccattagctgcatccgctgctccaactccacctcctgatctctcgtcttgtagtatagccaggattaacgaaaatcaggtggtgccgtacagttgttgcgcgcctaagcctgatgatatggagaaagttccgtattacaagttcccttctatgactaagctccgtggtcctgcaacttttatccgcctccatccagtgttcgtcagcctgctcatgaagctaatgaggagtatattgccaagtacaatctggcgattagtcgaatgagagatcttgataagacacaacctttaaacccta

SEQ ID NO: 641 - DNA, 604 bp, Artificial
  Mutation introduced by TALE nuclease pair POT32_T02 within a POT32 allele
gcaagcttgtgcaatagtagtagtacatctctcaaaactccttttacttcttcctccacttctttaacttccactcctaagccctctcaacttttcatccatggaaaacgtaaccaaatgttcaaagtttcatgcaaggttaccaataataacggtgaccaaaaccaaaacgttgaaacaaattctgttgatcgaagaaatgttcttcttggcttaggtggtctttatggtgttgctaatgctataccattagctgcatccgctgctccagctccacctcctgatctctcgtcttgtagtatagccaggattaacgaaaatcaggtggtgccgtacagttgttgcgcgcctaagcctgatgatatggagaaagttccgtattacaagttcccttctatgactaagctccgtgacagaaccgcaacgttgaaggagccactcagccgcggggtttctggagtttaatgagctaagcacatacgtcagaaaccattattgcgcgttcgtcagcctgctcatgaagctaatgaggagtatattgccaagtacaatttggcggttagcaagatgagggatcttgataagacacaacctttaaacccta

SEQ ID NO: 642 - DNA, 552 bp, Artificial
  Mutation introduced by TALE nuclease pair POT32_T02 within a POT32 allele
gcaagcttgtgcaatagttgtagtacatccctcaaaactccttttacttcttcctccacttctttaacttccactcctaaaccctctcaacttttcatccatggaaaacgtaaccaaatgttcaaagtttcatgcatggttaccaataataacggtgaccaaaaccaaaacgttgaaacgaattctgttgatcgaagaaatgttcttcttggcttaggtggtctttatggtgttgctaatgctataccattagctgcatccgctactccatctccacctcctgatctctcgtcttgtagtatagccaggattaacgaaactcatgtggtgccgtacagttgttgcgcgcctaagcctgatgatatggagaaagttccgtattacaagttcccttctatgactaagctccgaactcacgttaaggggattttggtcatgagattaagtaagttggccgcagtgttatcactcatggttcgtcagcctgctcatgaagctaatgaggagtatattgccaagtacaatctggcgattagtcgaatgaaagatctt

SEQ ID NO: 643 - DNA, 546 bp, Artificial
  Mutation introduced by TALE nuclease pair POT32_T02 within a POT32 allele
  misc_feature (151); (154): n is a or c or t or g
gcaagcttgtgcaatagtagtagtacatcctcaaaactccttttacttcttcctccacttctttatcttccactcctaaccgcctctcaacttttcatccatggaaaacgtaaccaaatgttcaaagtttcatgcagttgctatcaataanagngcgaaccaaaacaagttgaaacgaattctgttgatcgaagaaatgttcttcttggcttaggtggtctttatggtgttgctaatgctataccattagctgcatccgctgctccagctccacctcctgatctctcgtcttgtagtatagccaggattaacgaaaatcaggtggtgccgtacagttgttgcgcgcctaagcctgatgatatggagaaagttccgtattacaagttcccttctatgactaagctccgtggaacaggagagcgcacgaggggagcttccagggggttcgtcagcctgctcatgaagctaatgaggagtatattgccaagtacaatttggcggttagcaagatgagggatcttgataagacacaacctttaaacccta

SEQ ID NO: 644 - DNA, 535 bp, Artificial
  Mutation introduced by TALE nuclease pair POT32_T02 within a POT32 allele
gcaagcttgtgcaatagtagtagtacatctctcaaaactccttttacttcttcctccacttctttaacttccactcctaagccctctcaacttttcatccatggaaaacgtaaccaaatgttcaaagtttcatgcaaggttaccaataataacggtgaccaaaaccaaaacgttgaaacgaattctgttgatcgaagaaatgttcttcttggcttaggtggtctttatggtgttgctaatgctataccattagctgcatccgctgctccagctccacctcctgatctctcgtcttgtagtatagccaggattaacgaaaatcaggtggtgccgtacagttgttgcgcgcctaagcctgatgatatggagaaagttccgtattacaagttcccttctatgactaagctccgatctcagcgatctgtctatttcgttcgtcagcctgctcatgaagctaatgaggagtatattgccaagtacaatctggcgattagtcgaatgaaagatcttgataagacacaacctttaaacccta

SEQ ID NO: 645 - DNA, 558 bp, Artificial
  Mutation introduced by TALE nuclease pair POT32_T02 within a POT32 allele
gcaagcttgtgcaatagtagtagtacatctctcaaaactccttttacttcttcctccacttctttatcttccactcctaagccctctcaacttttcatccatggaaaacgtaaccaaatgttcaaagtttcatgcaaggttaccaataataacggtgaccaaaaccaaaacgttgaaacgaattctgttgatcgaagaaatgttcttcttggcttaggtggtctttatggtgttgctaatgctataccattagctgcatccgctgctccagctccacctcctgatctctcgtcttgtagtatagccaggattaacgaaaatcaggtggtgccgtacagttgttgcgcgcctaagcctgatgatatggagaaagttccgtattacaagttcccttctatgactaagctccgggtgcaggcgctgttgccggtgctgtgccaggcccacggcttcgtcagcctgctcatgaagctaatgaggagtatattgccaagtacaatctggcgattagtcgaatgaaagatcttgataagacacaacctttaaaccctattggtt

SEQ ID NO: 646 - DNA, 577 bp, Artificial
  Mutation introduced by TALE nuclease pair POT32_T02 within a POT32 allele
gcaagcttgtgcaatagtagtagtacatctctcaaaactccttttacttcttcctccacttctttaacttccactcctaagccctctcaacttttcatccatggaaaacgtaaccaaatgttcaaagtttcatgcaaggttaccaataataacggtgaccaaaaccaaaacgttgaaacgaattctgttgatcgaagaaatgttcttcttggcttaggtggtctttatggtgttgctaatgctataccattagctgcatccgctgctccagctccacctcctgatctctcgtcttgtagtatagccaggattaacgaaaatcaggtggtgccgtacagttgttgcgcgcctaagcctgatgatatggagaaagttccgtattacaagttcccttctatgactaagctccgtgcaactatggatgaacgaaatagacagatcgctgagataggtgcctcactgattaagcattggtatcgtcagcctgctcatgaagctaatgaggagtatattgccaagtacaatctggcgattagtcgaatgaaagatcttgataagacacaacctttaaacccta

SEQ ID NO: 647 - DNA, 583 bp, Artificial
  Mutation introduced by TALE nuclease pair POT32_T02 within a POT32 allele
gcaagcttgtgcaatagtagtagtacatctctcaaaactccttttacttcttcctccacttctttatcttccactcctaagccctctcaacttttcatccatggaaaacgtaaccaaatgttcaaagtttcatgcaaggttaccaataataacggtgaccaaaaccaaaacgttgaaacaaattctgttgatcgaagaaatgttcttcttggcttaggtggtctttatggtgttgctaatgctataccattagctgcatccgctgctccagctccacctcctgatctctcgtcttgtagtatagccaggattaacgaaaatcaggtggtgccgtacagttgttgcgcgcctaagcctgatgatatggagaaagttccgtattacaagttcccttctatgactaagctccgggtcctgggtgctgttccgggcgatctcgatcagctcgatgtactcgtgggggcacgtacttcagcttgtgttcgtcagcctgctcatgaagctaatgaggagtatattgccaagtacaatctggcgattagtcgaatgaaagatcttgataagacacaacctttaaacccta

SEQ ID NO: 648 - DNA, 465 bp, Artificial; identical to SEQ ID NO: 425
  Mutation introduced by TALE nuclease pair POT32_T02 within a POT32 allele
  misc_feature (396); (397); (398); (399); (400); (463); (464): n is a or c or t or g

SEQ ID NO: 649 - DNA, 576 bp, Artificial
  Mutation introduced by TALE nuclease pair POT32_T02 within a POT32 allele
gcaagcttgtgcaatagtagtagtacatctctcaaaactccttttacttcttcctccacttctttatcttccactcctaagccctctcaacttttcatccatggaaaacgtaaccaaatgttcaaagtttcatgcaaggttaccaataataacggtgaccaaaaccaaaacgttgaaacgaattctgttgatcgaagaaatgttcttcttggcttaggtggtctttatggtgttgctaatgctataccattagctgcatccgctgctccagctccacctcctgatctctcgtcttgtagtatagccaggattaacgaaaatcaggtggtgccgtacagttgttgcgcgcctaagcctgatgatatggagaaagttccgtattacaagttcccttctatgactaagctacaataaccctgataaatgcttcaataatattgaaaaggaagagtatgagtattcaacatttccgtgtcgccctagcctgctcatgaagctaatgaggagtatattgccaagtacaattggcggttagcaagatgagggatcttgataagacacaacctttaaacccta

SEQ ID NO: 650 - DNA, 460 bp, Artificial
  Mutation introduced by TALE nuclease pair POT32_T02 within a POT32 allele
  misc_feature (268): n is a or c or t or g
gcaagcttgtgcaatagtagtagtacatctctcaaaactccttttacttcttcctccacttctttatcttccactcctaagcccctctcaacttttcatccatggaaaacgtaaccaaatgttcaaagtttcatgcaaggttatcaataataacggtgaaccaaaacgttgaaacgaattctgttgatcgaagaaatgttcttcttggcttaggtggtctttatggtgttgctaatgctataccattagctgcatccgctgctccaantccacctcctgatctctcgtcttgtagtatagccaggattaacgaaaatcaggtggtgccgtacagttgttgcgcgcctaagcctgatgatatggagaaagttccgtattacaagttcccttctatgactaagctccgtgtggtcctgcactttatccgcctcatcagtttattaattgttgccgggaagct

SEQ ID NO: 651 - DNA, 620 bp, Artificial
  Mutation introduced by TALE nuclease pair POT32_T02 within a POT32 allele
  misc_feature (475): n is a or c or t or g
gcaagcttgtgcaatagtagtagtacatctctcaaaactccttttacttcttcctccacttctttatcttccactcctaagcccctctcaacttttcatccatggaaaacgtaaccaaatgttcaaagtttcatgcaaggttaccaataataacggtgaccaaaaccaaaacgttgaaacgaattctgttgatcgaagaaatgttcttcttggcttaggtggtctttatggtgttgctaatgctataccattagctgcatccgctgctccagctccacctcctgatctctcgtcttgtagtatagccaggattaacgaaaatcaggtggtgccgtcacagttgttgcgcgcctaagcctgatgatatggagaaagttccgtattacaagttcccttctatgactaagctccggcggtggttttgttttgccggatcaagagctaccaactctttttccgaaggtaactggcttcngcagagcgcagatacccaaaatactgttcttctagtgtagccgtagttaggcccagcctgctcatgaagctaatgaggagtatattgccaagtacaatttggcggttagcaagatgagggatcttgataagacacaacctttaaa

SEQ ID NO: 652 - DNA, 566 bp, Artificial
  Mutation introduced by TALE nuclease pair POT32_T02 within a POT32 allele
gcaagcttgtgcaatagttgtagtacatccctcaaaactccttttacttcttcctccacttctttaacttccactcctaaaccctctcaacttttcatccatggaaaacgtaaccaaatgttcaaagtttcatgcatggttaccaataataacggtgaccaaaaccaaaacgttgaaacgaattctgttgatcgaagaaatgttcttcttggcttaggtggtctttatggtgttgctaatgctataccattagctgcatccgctactccatctccacctcctgatctctcgtcttgtagtatagccaggattaacgaaactcatgtggtgccgtacagttgttgcgcgcctaagcctgatgatatggagaaagttccgtattacaagttcccttctatgactaagctccgtgttcgttccactgagcgtcagaccccgtagaaaagatcaaaggatcttcttgagatcctttttttccgtcagcctgctcatgaagctaatgaggagtatattgccaagtacaatttggcggttagcaagatgagggatcttgataagacacaacc

SEQ ID NO: 653 - DNA, 597 bp, Artificial
  Mutation introduced by TALE nuclease pair POT32_T02 within a POT32 allele
gcaagcttgtgcaatagtagtagtacatctctcaaaactccttttacttcttcctccacttctttaacttccactcctaagccctctcaacttttcatccatggaaaacgtaaccaaatgttcaaagtttcatgcaaggttaccaataataacggtgaccaaaaccaaaacgttgaaacgaattctgttgatcgaagaaatgttcttcttggcttaggtggtctttatggtgttgctaatgctataccattagctgcatccgctgctccagctccacctcctgatctctcgtcttgtagtatagccaggattaacgaaaatcaggtggtgccgtacagttgttgcgcgcctaagcctgatgatatggagaaagttccgtattacaagttcccttctatgactaagctccggctggcgatggccaccacctgctggggggtcaagccgtggggcctggcacagcaccggcaacagcgcctgcaccgtctccagcgcctgcttcgtcagcctgctcatgaagctaatgaggagtatattgcccaagtacaatctggcgattagtcgaatgaaagatcttgataagacacaacctttaaa

SEQ ID NO: 654 - DNA, 543 bp, Artificial
  Mutation introduced by TALE nuclease pair POT32_T02 within a POT32 allele
gcaagcttgtgcaatagtagtagtacatctctcaaaactccttttacttcttcctccacttctttaacttccactcctaagcccctctcaacttttcatccatggaaaacgtaaccaaatgttcaaagtttcatgcaaggttaccaataataacggtgaccaaaaccaaaacgttgaaacgaattctgttgatcgaagaaatgttcttcttggcttaggtggtctttatggtgttgctaatgctataccattagctgcatccgctgctccagctccacctcctgatctctcgtcttgtagtatagccaggattaacgaaaatcaggtggtgccgtacagttgttgcgcgcctaagcctgatgatatggagaaagttccgtattacaagttcccttctatgactaagctccgtggtaatatccggaaacctcctcggattccttcgtcagcctgctcatgaagctaatgaggagtatattgccaagtacaatctggcgattagtcgaatgaaagatcttgataagacacaacctttaaacccta

SEQ ID NO: 655 - DNA, 567 bp, Artificial
  Mutation introduced by TALE nuclease pair POT32_T02 within a POT32 allele
gcaagcttgtgcaatagttgtagtacatccctcaaaactccttttacttcttcctccacttctttaacttccactcctaaaccctctcaacttttcatccatggaaaacgtaaccaaatgttcaaagtttcatgcatggttaccaataataacggtgaccaaaaccaaaacgttgaaacgaattctgttgatcgaagaaatgttcttcttggcttaggtggtctttatggtgttgctaatgctataccattagctgcatccgctactccatctccacctcctgatctctcgtcttgtagtatagccaggattaacgaaactcatgtggtgccgtacagttgttgcgcgcctaagcctgatgatatggagaaagttccgtattacaagttcccttctatgactaagctccgaactcacgttaaggggatttttggtcatgagattaagtaagttggccgcagtgttatcactcatggttcgtcagcctgctcatgaagctaatgaggagtatattgccaagtacaatctggcgattagtcgaatgaaagatcttgataagacacaacc

SEQ ID NO: 656 - DNA, 607 bp, Artificial
  Mutation introduced by TALE nuclease pair POT32_T02 within a POT32 allele
  misc_feature (537): n is a or c or t or g
gcaagcttgtgcaatagtagtagtacatctctcaaaactccttttacttcttcctccacttctttatcttccactcctaagccctctcaacttttcatccatggaaaacgtaaccaaatgttcaaagtttcatgcaaggttaccaataataacggtgaccaaaaccaaaacgttgaaacaaaattctgttgatcgaagaaatgttcttcttggcttaggtggtctttatggtgttgctaatgctataccattagctgcatccgctgctccagctccacctcctgatctctcgtcttgtagtatagccaggatttaacgaaaatcaggtggttgccgtacagttgttgcgcgcctaagcctgatgatatggagaaagttccgtattacaagttcccttctatgactaagctccgctggattttgctggcccaattcgctattccagccggaaataacgctgcgcgatgcgtttatccagctcgccatcttcaatcatgcgcgctgcaatttttcagcgccagtgccatcgtatcgtcngcctgctcatgaagctaatgaggagtatattgccaagtacaatctggcgattagtcgaatgaaagatctt

SEQ ID NO: 657 - DNA, 570 bp, Artificial
  Mutation introduced by TALE nuclease pair POT32_T02 within a POT32 allele
gcaagcttgtgcaatagttgtagtacatccctcaaaactccttttacttcttcctccacttctttaacttccactcctaaaccctctcaacttttcatccatggaaaacgtaaccaaatgttcaaagtttcatgcatggttaccaataataacggtgaccaaaaccaaaacgttgaaacgaattctgttgatcgaagaaatgttcttcttggcttaggtggtctttatggtgttgctaatgctataccattagctgcatccgctactccatctccacctcctgatctctcgtcttgtagtatagccaggattaacgaaactcatgtggtgccgtacagttgttgcgcgcctaagcctgatgatatggagaaagttccgtattacaagttcccttctatgactaagctccgaactcacgttaaggggattttggtcatgagattaagtaagttggccgcagtgttatcactcatggttcgtcagcctgctcatgaagctaatgaggagtatattgccaagtacaatctggcgattagtcgaatgaaagatcttgataagacacaacctttt

SEQ ID NO: 658 - DNA, 511 bp, Artificial
  Mutation introduced by TALE nuclease pair POT32_T02 within a POT32 allele
gcaagcttgtgcaatagtagtagtacatctctcaaaactccttttacttcttcctccacttctttatcttccactcctaagcccctctcaacttttcatccatggaaaacgtaaccaaatgttcaaagtttcatgcaaggttatcaataataacggtgaccaaaacgttgaaacgaattctgttgatcgaagaaatgttcttcttggcttaggtggtctttatggtgttgctaatgctataccattagctgcatccgctgctccaactccacctcctgatctctcgtcttgtagtatagccaggattaacgaaaatcaggtggtgccgtacagttgttgcgcgcctaagcctgatgatatggagaaagttccgtattacaagttcccttctatgactaagctccgtgatcatgagcggagaattaaggggagtcgtcagcctgctcatgaagctaatgaggagtatgattgccaagtacaatctggcgattagtcgaatgagagatcttga

SEQ ID NO: 659 - DNA, 541 bp, Artificial
  Mutation introduced by TALE nuclease pair POT32_T02 within a POT32 allele
gcaagcttgtgcaatagtagtagtacatctctcaaaactccttttacttcttcctccacttctttaacttccactcctaagccctctcaacttttcatccatggaaaacgtaaccaaatgttcaaagtttcatgcaaggttaccaataataacggtgaccaaaaccaaaacgttgaaacgaattctgttgatcgaagaaatgttcttcttggcttaggtggtctttatggtgttgctaatgctataccattagctgcatccgctgctccagctccacctcctgatctctcgtcttgtagtatagccaggattaacgaaaatcaggtggtgccgtacagttgttgcgcgcctaagcctgatgatatggagaaagttccgtattacaagttcccttctatgactaagctccgtggtaatatccggaaacctcctcggattccttcgtcagcctgctcatgaagctaatgaggagtatattgccaagtacaatctggcgattagtcgaatgaaagatcttgataagacacaacctttaaaccct

SEQ ID NO: 660 - DNA, 482 bp, Artificial
  Mutation introduced by TALE nuclease pair POT32_T02 within a POT32 allele
gcaagcttgtgcaatagtagtagtacatctctcaaaactccttttacttcttcctccacttctttaacttccactcctaaaccctctcaacttttcatccatggaaaacgtaaccaaatgttcaaagtttcatgcaaggttaccaataataacggtgaccaaaaccaaaacgttgaaacgaattctgttgatcgaagaaatgttcttcttggcttaggtggtctttatggtgttgctaatgctataccattagctgcatccgctactccatctccacctcctgatctctcgtcttgtagtatagccaggattaacgaaactcatgtggtgccgtacagttgttgcgcgcctaagcctgatgatatggagaaagttccgtattacaagttcccttctatgactaagctccgttcgtgtcctcctgctcatgaagctaatgagggagtatattgccaagtacaatttggcggttagcaagatga

SEQ ID NO: 661 - DNA, 559 bp, Artificial
  Mutation introduced by TALE nuclease pair POT32_T02 within a POT32 allele
gcaagcttgtgcaatagtagtagtacatctctcaaaactccttttacttcttcctccacttctttatcttccactcctaagcccctctcaacttttcatccatggaaaacgtaaccaaatgttcaaagtttcatgcaaggttatcaataataacggtgaccaaaacgttgaaacgaattctgttgatcgaagaaatgttcttcttggcttaggtggtctttatggtgttgctaatgctataccattagctgcatccgctgctccaactccacctcctgatctctcgtcttgtagtatagccaggattaacgaaaatcaggtggtgccgtacagttgttgcgcgcctaagcctgatgatatggagaaagttccgtattacaagttcccttctatgactaagctccgtgtgaaaaaggggattgggggatcctatcagccgttcccagctggtgaagtccgagtcagcctgctcatgaagctaatgaggagtatattgccaagtacaatctggcgattagtcgaatgagagatcttgataagacacaacctttaaacccta

SEQ ID NO: 662 - DNA, 526 bp, Artificial
  Mutation introduced by TALE nuclease pair POT32_T02 within a POT32 allele
gcaagcttgtgcaatagtagtagtacatctctcaaaactccttttacttcttcctccacttctttatcttccactcctaagccctctcaacttttcatccatggaaaacgtaaccaaatgttcaaagtttcatgcaaggttaccaataataacggtgaccaaaaccaaaacgttgaaacaaattctgttgatcgaagaaatgttcttcttggcttaggtggtctttatggtgttgctaatgctataccattagctgcatccgctgctccagctccacctcctgatctctcgtcttgtagtatagccaggattaacgaaactcatgtggtgccgtacagttgttgcgcgcctaagcctgatgatatggagaaagttccgtattacaagttcccttctatgactaagctccgattggatcggatcccgggcccgtcgactgtcagcctgctcatgaagctaatgaggagtatattgccaagtacaatctggcgattagtcgaatgaaagatcttgataagacacaacc

SEQ ID NO: 663 - DNA, 618 bp, Artificial
  Mutation introduced by TALE nuclease pair POT32_T02 within a POT32 allele
gcaagcttgtgcaatagtagtagtacatctctcaaaactccttttacttcttcctccacttctttatcttccactcctaagccctctcaacttttcatccatggaaaacgtaaccaaatgttcaaagtttcatgcaaggttatcaataataacggtgaccaaaacgttgaaacgaattctgttgatcgaagaaatgttcttcttggcttaggtggtctttatggtgttgctaatgctataccattagctgcatccgctgctccaactccacctcctgatctctcgtcttgtagtatagccaggattaacgaaaatcaggtggtgccgtacagttgttgcgcgcctaagcctgatgatatggagaaagttccgtattacaagttcccttctatgactaagctccgtcgtacttcagcttgtgcctcaactcggatttcttctcctccagctcggacttcaccgcgggtttctggagtttaatgagctgttgccggtgctgtgccaggcccacggcttgacccgtcagcctgctcatgaagctaatgaggagtatattgccaagtacaatctggcgattagtcgaatgagagatcttgataagacacaacctttaaaccc

SEQ ID NO: 664 - DNA, 585 bp, Artificial
  Mutation introduced by TALE nuclease pair POT32_T02 within a POT32 allele
gcaagcttgtgcaatagtagtagtacatctctcaaaactccttttacttcttcctccacttctttatcttccactcctaagcccctctcaacttttcatccatggaaaacgtaaccaaatgttcaaagtttcatgcaaggttaccaataataacggtgaccaaaaccaaaacgttgaaacaaattctgttgatcgaagaaatgttttcttggcttaggtggtctttatggtgttgctaatgctataccattagctgcatccgctgctccagctccacctcctgatctctcgtcttgtagtatagccaggattaacgaaaatcaggtggtgccgtacagttgttgcgcgcctaagcctgatgatatggagaaagttccgtattacaagttcccttctatgactaagctccgccgcgcgcgataatttatcctagtttgcgcgctatattttgttttctatcgcgtattaatgtataattgcgggaccgtcagcctgctcatgaagctaatgaggagtatattgccaagtacaatctggcgattagtcgaatgaaagatcttgataagacacaacctttaaacccta

SEQ ID NO: 665 - DNA, 570 bp, Artificial
  Mutation introduced by TALE nuclease pair POT32_T02 within a POT32 allele
gcaagcttgtgcaatagttgtagtacatccctcaaaactccttttacttcttcctccacttctttaacttccactcctaaaccctctcaacttttcatccatggaaaacgtaaccaaatgttcaaagtttcatgcatggttaccaataataacggtgaccaaaaccaaaacgttgaaacgaattctgttgatcgaagaaatgttcttcttggcttaggtggtctttatggtgttgctaatgctataccattagctgcatccgctactccatctccacctcctgatctctcgtcttgtagtatagccaggattaacgaaactcatgtggtgccgtacagttgttgcgcgcctaagcctgatgatatggagaaagttccgtattacaagttcccttctatgactaagctccgaactcacgttaaggggatttttggtcatgagattaagtaagttggccgcagtgttatcactcatggttcgtcagcctgctcatgaagctaatgaggagtatattgccaagtacaatctggcgattagtcgaatgaaagatcttgataagacacaaccttt

SEQ ID NO: 666 - DNA, 593 bp, Artificial
  Mutation introduced by TALE nuclease pair POT32_T02 within a POT32 allele
gcaagcttgtgcaatagtagtagtacatctctcaaaactccttttacttcttcctccacttctttaacttccactcctaagccctctcaacttttcatccatggaaaacgtaaccaaatgttcaaagtttcatgcaaggttaccaataataacggtgaccaaaaccaaaacgttgaaacgaattctgttgatcgaagaaatgttcttcttggcttaggtggtctttatggtgttgctaatgctataccattagctgcatccgctgctccagctccacctcctgatctctcgtcttgtagtatagccaggattaacgaaaatcaggtggtgccgtacagttgttgcgcgcctaagcctgatgatatggagaaagttccgtattacaagttcccttctatgactaagctccggctggcgatggccaccacctgctggggggtcaagccgtggggcctggcacagcaccggcaacagcgcctgcaccgtctccagcgcctgcttcgtcagcctgctcatgaagctaatgaggagtatattgccaagtacaatctggcgattagtcgaatgaaagatcttgataagacacaaccttt

SEQ ID NO: 667 - DNA, 628 bp, Artificial
  Mutation introduced by TALE nuclease pair POT32_T02 within a POT32 allele
gcaagcttgtgcaatagtagtagtacatctctcaaaactccttttacttcttcctccacttctttatcttccactcctaagcccctctcaacttttcatccatggaaaacgtaaccaaatgttcaaagtttcatgcaaggttaccaataataacggtgaccaaaaccaaaacgttgaaacaaattctgttgatcgaagaaatgttcttcttggcttaggtggtctttatggtgttgctaatgctataccattagctgcatccgctgctccagctccacctcctgatctctcgtcttgtagtatagccaggattaacgaaaatcaggtggtgccgtacagttgttgcgcgcctaagcctgatgatatggagaaagttccgtattacaagttcccttctatgactaagctccgtatgcatgcactgcctccactgcggtcacgccgccacgtttttggccgcgttgaccaacgaccacctcgtcgccttggcctgcctcggcgggcgtcctgcgctggggatgtgctgcaaggcgattaagttgggtaacgccagggttttcgtcagcctgctcatgaagctaatgaggagtatattgccaagtacaatctggcgattagtcgaatgaaa

SEQ ID NO: 668 - DNA, 551 bp, Artificial; identical to SEQ ID NO: 494
  Mutation introduced by TALE nuclease pair POT32_T02 within a POT32 allele

SEQ ID NO: 669 - DNA, 569 bp, Artificial
  Mutation introduced by TALE nuclease pair POT32_T02 within a POT32 allele
gcaagcttgtgcaatagtagtagtacatctctcaaaactccttttacttcttcctccacttctttatcttccactcctaagcccctctcaacttttcatccatggaaaacgtaaccaaatgttcaaagtttcatgcaaggttaccaataataacggtgaccaaaaccaaaacgttgaaacgaattctgttgatcgaagaaatgttcttcttggcttaggtggtctttatggtgttgctaatgctataccattagctgcatccgctgctccagctccacctcctgatctctcgtcttgtagtatagccaggattaacgaaaatcaggtggtgccgtacagttgttgcgcgcctaagcctgatgatatggagaaagttccgtattacaagttcccttctatgactaagctccgtggcgacgaggtggtcgttggtcaacgcggccaacgccggatcagggcgagataactgggcaacaatgctctccagcgccggcctgccgccgccattgctggcgatggccaccacctgctgagggtcaagccgttcgtcagcctgctcatgaagctaa

SEQ ID NO: 670 - DNA, 554 bp, Artificial
  Mutation introduced by TALE nuclease pair POT32_T02 within a POT32 allele
gcaagcttgtgcaatagttgtagtacatccctcaaaactccttttacttcttcctccacttctttaacttccactcctaaaccctctcaacttttcatccatggaaaacgtaaccaaatgttcaaagtttcatgcatggttaccaataataacggtgaccaaaaccaaaacgttgaaacgaattctgttgatcgaagaaatgttcttcttgggcttaggtggtctttatggtgttgctaatgctataccattagctgcatccgctactccatctccacctcctgatctctcgtcttgtagtatagccaggattaacgaaactcatgtggtgccgtacagttgttgcgcgcctaagcctgatgatatggagaaagttccgtattacaagttcccttctatgactaagctccgaactcacgttaaggggattttggtcatgagattaagtaagttgggccgcagtgttatcactcatggttcgtcagcctgctcatgaagctaatgaggagtatattgccaagtacaatctggcgattagtcgaatgaaagatctt

SEQ ID NO: 671 - DNA, 568 bp, Artificial
  Mutation introduced by TALE nuclease pair POT32_T02 within a POT32 allele
gcaagcttgtgcaatagttgtagtacatccctcaaaactccttttacttcttcctccacttctttaacttccactcctaaaccctctcaacttttcatccatggaaaacgtaaccaaatgttcaaagtttcatgcatggttaccaataataacggtgaccaaaaccaaaacgttgaaacgaattctgttgatcgaagaaatgttcttcttggcttaggtggtctttatggtgttgctaatgctataccattagctgcatccgctactccatctccacctcctgatctctcgtcttgtagtatagccaggattaacgaaactcatgtggtgccgtacagttgttgcgcgcctaagcctgatgatatggagaaagttccgtattacaagttcccttctatgactaagctccgaactcacgttaaaggggatttttggtcatgagattaagtaagttggccgcagtgttatcactcatggttcgtcagcctgctcatgaagctaatgaggagtatattgccaagtacaatctggcgattagtcgaatgaaagatcttgataagacacaacc

SEQ ID NO: 672 - DNA, 610 bp, Artificial
  Mutation introduced by TALE nuclease pair POT32_T02 within a POT32 allele
gcaagcttgtgcaatagtagtagtacatctctcaaaactccttttacttcttcctccacttctttacttccactcctaagccctctcaacttttcatccatggaaaacgtaaccaaatgttcaaagtttcatgcaaggttaccaataataacggtgaccaaaaccaaaacgttgaaacgaattctgttgatcgaagaaatgttcttcttggcttaggtggtctttatggtgttgctaatgctataccattagctgcatccgctgctccagctccacctcctgatctctcgtcttgtagtatagccaggattaacgaaaatcaggtggtgccgtacagttgttgcgcgcctaagcctgatgatatggagaaagttccgtattacaagttcccttctatgactaagctccgtggtggcaagcaggcgctggagacggtgcaggcgctgttgccggtgctgtgccaggcccacggcttgacccccagcaggtggtggccatcgccagcaataatggtggcaagcaggcgctggagacggtccagcggctcagcctgctcatgaagctaatgaggagtatattgccaagtacaatttggcggttagcaagatga

SEQ ID NO: 673 - DNA, 547 bp, Artificial
  Mutation introduced by TALE nuclease pair POT32_T02 within a POT32 allele
gcaagcttgtgcaatagtagtagtacatcctcaaaactccttttacttcttcctccacttctttaacttccactcctaaaccctctcaacttttcatccatggaaaacgtaaccaaatgttcaaagtttcatgcatggttaccaataataacggtgaccaaaaccaaaacgttgaaacgaattctgttgatcgaagaaatgttcttcttggcttaggtggtctttatggtgttgctaatgctataccattagctgcatccgctactccatctccacctcctgatctctcgtcttgtagtatagccaggattaacgaaactcatgtggtgccgtacagttgttgcgcgcctaagcctgatgatatggagaaagttccgtattacaagttcccttctatgactaagctcatccgcttacagacaagcccgtcaggggcgcgtcagcggggtgttgccggtcgtcagcctgctcatgaagctaatgaggagtatattgccaagtacaatctggcgattagtcgaatgaaagatcttgataagacacaacc

SEQ ID NO: 674 - DNA, 540 bp, Artificial
  Mutation introduced by TALE nuclease pair POT32_T02 within a POT32 allele
gcaagcttgtgcaatagttgtagtacatctctcaaaactccttttacttcttcctccacttctttaacttccactcctaaaccctctcaacttttcatccatggaaaacgtaaccaaatgttcaaagtttcatgcaaggttaccaataataacggtgaccaaaaccaaaacgttgaaacgaattctgttgatcgaagaaatgttcttcttggcttaggtggtctttatggtgttgctaatgctataccattagctgcatccgctactccatctccacctcctgatctctcgtcttgtagtatagccaggattaacgaaactcatgtggtgccgtacagttgttgcgcgcctaagcctgatgatatggagaaagttccgtattacaagttcccttctatgactaagctccgtgataccgctcgccgcagccgaacgaccgactcagcctgctcatgaagctaatgaggagtatattgcccaagtacaatctggcgattagtcgaatgaaagatcttgataagacacaacctttaaacccta

SEQ ID NO: 675 - DNA, 643 bp, Artificial
  Mutation introduced by TALE nuclease pair POT32_T02 within a POT32 allele
gcaagcttgtgcaatagtagtagtacatctctcaaaactccttttacttcttcctccacttctttatcttccactcctaagccctctcaacttttcatccatggaaaacgtaaccaaatgttcaaagtttcatgcaaggttaccaataataacggtgaccaaaaccaaaacgttgaaacaaattctgttgatcgaagaaatgttcttcttggcttaggtggtctttatggtgttgctaatgctataccattagctgcatccgctgctccagctccacctcctgatctctcgtcttgtagtatagccaggattaacgaaaatcaggtggtgccgtacagttgttgcgcgcctaagcctgatgatatggagaaagttccgtattacaagttcccttctatgactaagctccgtggttggaatatgtattatcataataatggtagaaatggaatcatttttctttttatattctatacaaaagtcctataacttcattaataagtctaagtagcagaagtaggtttctagggatgttttatcaatttgtcagcctgctcatgaagctaatgaggagtatattgccaagtacaatctggcgattagtcgaatgaaagatcttgataagacacaacctttaaaccct

SEQ ID NO: 676 - DNA, 574 bp, Artificial
  Mutation introduced by TALE nuclease pair POT32_T02 within a POT32 allele
gcaagcttgtgcaatagttgtagtacatccctcaaaactccttttacttcttcctccacttctttaacttccactcctaaaccctctcaacttttcatccatggaaaacgtaaccaaatgttcaaagtttcatgcatggttaccaataataacggtgaccaaaaccaaaacgttgaaacgaattctgttgatcgaagaaatgttcttcttggcttaggtggtctttatggtgttgctaatgctataccattagctgcatccgctactccatctccacctcctgatctctcgtcttgtagtatagccaggattaacgaaactcatgtggtgccgtacagttgttgcgcgcctaagcctgatgatatggagaaagttccgtattacaagttcccttctatgactaagctccgaactcacgttaaaggggatttttggtcatgagattaagtaagttggccgcagtgttatcactcatggttcgtcagcctgctcatgaagctaatgaggagtatattgccaagtacaatctggcgattagtcgaatgaaagatcttgataagacacaacctttaaa

SEQ ID NO: 677 - DNA, 621 bp, Artificial
  Mutation introduced by TALE nuclease pair POT32_T02 within a POT32 allele
gcaagcttgtgcaatagtagtagtacatctctcaaaactccttttacttcttcctccacttctttatcttccactcctaagcccctctcaacttttcatccatggaaaacgtaaccaaatgttcaaagtttcatgcaaggttatcaataataacggtgaccaaaacgttgaaacgaattctgttgatcgaagaaatgttcttcttggcttaggtggtctttatggtgttgctaatgctataccattagctgcatccgctgctccaactccacctcctgatctctcgtcttgtagtatagccaggattaacgaaaatcaggtggtgccgtacagttgttgcgcgcctaagcctgatgatatggagaaagttccgtattacaagttcccttctatgactaagctcctagaccagagaaccgtggatatcgctatcaccaattcgcccattaaaaccgcgataatcaaagaccgacgattttttcagtgtcgatttttcgctaccagccgaccatccgttttcaaacggcgggtatcgggcagcagaaatgaggagtatattgccaagtacaatctggcgattagtcgaatgagagatcttgataagacacaacctttaaaccc

SEQ ID NO: 678 - DNA, 552 bp, Artificial; identical to SEQ ID NO: 528
  Mutation introduced by TALE nuclease pair POT32_T02 within a POT32 allele

SEQ ID NO: 679 - DNA, 575 bp, Artificial
  Mutation introduced by TALE nuclease pair POT32_T02 within a POT32 allele
gcaagcttgtgcaatagttgtagtacatctctcaaaactccttttacttcttcctccacttctttaacttccactcctaaaccctctcaacttttcatccatggaaaacgtaaccaaatgttcaaagtttcatgcaaggttaccaataataacggtgaccaaaaccaaaacgttgaaacgaattctgttgatcgaagaaatgttcttcttggcttaggtggtctttatggtgttgctaatgctataccattagctgcatccgctgctccagctccacctcctgatctctcgtcttgtagtatagccaggattaacgaaaatcaggtggtgccgtacagttgttgcgcgcctaagcctgatgatatggagaaagttccgtattacaagttcccttctatgactaagctccgtggccatcgccagcaatggcggtggcaagcaggcgctggagacggtccagcggctgttgccggtgctcgtcagcctgctcatgaagctaatgaggagtatattgccaagtacaatctggcgattagtcgaatgaaagatcttgataagacacaacctttaaaccc

SEQ ID NO: 680 - DNA, 566 bp, Artificial
  Mutation introduced by TALE nuclease pair POT32_T02 within a POT32 allele
gcaagcttgtgcaatagttgtagtacatctctcaaaactccttttacttcttcctccacttctttaacttccactcctaaaccctctcaacttttcatccatggaaaacgtaaccaaatgttcaaagtttcatgcaaggttaccaataataacggtgaccaaaaccaaaacgttgaaacgaattctgttgatcgaagaaatgttcttcttggcttaggtggtctttatggtgttgctaatgctataccattagctgcatccgctgctccagctccacctcctgatctctcgtcttgtagtatagccaggattaacgaaaatcaggtggtgccgtacagttgttgcgcgcctaagcctgatgatatggagaaagttccgtattacaagttcccttctatgactaagctccgtggccatcgccagcaatggcggtggcaagcaggcgctggagacggtccagcggctgttgccggtgctcgtcagcctgctcatgaagctaatgaggagtatattgccaagtacaatctggcgattagtcgaatgaaagatcttgataagacacaacc

SEQ ID NO: 681 - DNA, 598 bp, Artificial
  Mutation introduced by TALE nuclease pair POT32_T02 within a POT32 allele
gcaagcttgtgcaatagtagtagtacatctctcaaaactccttttacttcttcctccacttctttatcttccactcctaagcccctctcaacttttcatccatggaaaacgtaaccaaatgttcaaagtttcatgcaaggttatcaataataacggtgaccaaaacgttgaaacgaattctgttgatcgaagaaatgttcttcttggcttaggtggtctttatggtgttgctaatgctataccattagctgcatccgctgctccaactccacctcctgatctctcgtcttgtagtatagccaggattaacgaaaatcaggtggtgccgtacagttgttgcgcgcctaagcctgatgatatggagaaagttccgtattacaagttcccttctatgactaagctcctagaccagagaaccgtggatatcgctatcaccaattcgcccattaaaaccgcgataatcaaagaccgacgattttttcagtgtcgatttttcgctaccagccgaccatccgtttcaaacggcgggtatcgggcagcagaaatgaggagtatattgccaagtacaatctggcgattagtcgaatgagagatcttg

SEQ ID NO: 682 - DNA, 585 bp, Artificial
  Mutation introduced by TALE nuclease pair POT32_T02 within a POT32 allele
gcaagcttgtgcaatagtagtagtacatctctcaaaactccttttacttcttcctccacttctttatcttccactcctaagcccctctcaacttttcatccatggaaaacgtaaccaaatgttcaaagtttcatgcaaggttaccaataataacggtgaccaaaaccaaaacgttgaaacaaattctgttgatcgaagaaatgttttcttggcttaggtggtctttatggtgttgctaatgctataccattagctgcatccgctgctccagctccacctcctgatctctcgtcttgtagtatagccaggattaacgaaaatcaggtggtgccgtacagttgttgcgcgcctaagcctgatgatatggagaaagttccgtattacaagttcccttctatgactaagctccgccgcgcgcgataatttatcctagtttgcgcgctatatttgttttctatcgcgtattaaatgtataattgcgggaccgtcagcctgctcatgaagctaatgaggagtatattgccaagtacaatctggcgattagtcgaatgaaagatcttgataagacacaacctttaaacccta

SEQ ID NO: 683 - DNA, 567 bp, Artificial
  Mutation introduced by TALE nuclease pair POT32_T02 within a POT32 allele
gcaagcttgtgcaatagttgtagtacatccctcaaaactccttttacttctttcctccacttctttaacttccactcctaaaccctctcaacttttcatccatggaaaacgtaaccaaatgttcaaagtttcatgcatggttaccaataataacggtgaccaaaaccaaaacgttgaaacgaattctgttgatcgaagaaatgttcttcttggcttaggtggtctttatggtgttgctaatgctataccattagctgcatccgctactccatctccacctcctgatctctcgtcttgtagtatagccaggattaacgaaactcatgtggtgccgtacagttgttgcgcgcctaagcctgatgatatggagaaagttccgtattacaagttcccttctatgactaagctccgaactcacgttaaggggattttggtcatgagattaagtaagttggccgcagtgttatcactcatggttcgtcagcctgctcatgaagctaatgaggagtatattgccaagtacaatctggcgattagtcgaatgaaagatcttgataagacacaacc

SEQ ID NO: 684 - DNA, 543 bp, Artificial
  Mutation introduced by TALE nuclease pair POT32_T02 within a POT32 allele
gcaagcttgtgcaatagtagtagtacatctctcaaaactccttttacttcttcctccacttctttacttccactcctaagccctctcaacttttcatccatggaaaacgtaaccaaatgttcaaagtttcatgcaaggttaccaataataacggtgaccaaaaccaaaacgttgaaacgaattctgttgatcgaagaaatgttcttcttggcttaggtggtctttatggtgttgctaatgctataccattagctgcatccgctgctccagctccacctcctgatctctcgtcttgtagtatagccaggattaacgaaaatcaggtggtgccgtacagttgttgcgcgcctaagcctgatgatatggagaaagttccgtattacaagttcccttctatgactaagctccgtgttctcccgagaggtcacaattgccgcgagcaaagatattaatgttcgtcagcctgctcatgaagctaatgaggagtatattgccaagtacaatctggcgattagtcgaatgaaagatcttgataagacacaa

SEQ ID NO: 685 - DNA, 563 bp, Artificial
  Mutation introduced by TALE nuclease pair POT32_T02 within a POT32 allele
gcaagcttgtgcaatagtagtagtacatctctcaaaactccttttacttcttcctccacttctttacttccactcctaagcccctctcaacttttcatccatggaaaacgtaaccaaatgttcaaagtttcatgcaaggttaccaataataacggtgaccaaaaccaaaacgttgaaacgaattctgttgatcgaagaaatgttcttcttggcttaggtggtctttatggtgttgctaatgctataccattagctgcatccgctgctccagctccacctcctgatctctcgtcttgtagtatagccaggattaacgaaaatcaggtggtgccgtacagttgttgcgcgcctaagcctgatgatatggagaaagttccgtattacaagttcccttctatgactaagctccgtgttctcccgagaggtcacaattgccgcgagcaaagatattaatgttcgtcagcctgctcatgaagctaatgaggagtatattgccaagtacaatctggcgattagtcgaatgaaagatcttgataagacacaacctttaaaccctattggtt

SEQ ID NO: 686 - DNA, 586 bp, Artificial
  Mutation introduced by TALE nuclease pair POT32_T02 within a POT32 allele
gcaagcttgtgcaatagtagtagtacatctctcaaaactccttttacttcttcctccacttctttatcttccactcctaagcccctctcaacttttcatccatggaaaacgtaaccaaatgttcaaagtttcatgcaaggttaccaataataacggtgaccaaaaccaaaacgttgaaacaaattctgttgatcgaagaaatgttttcttggcttaggtggtctttatggtgttgctaatgctataccattagctgcatccgctgctccagctccacctcctgatctctcgtcttgtagtatagccaggattaacgaaaatcaggtggtgccgtacagttgttgcgcgcctaagcctgatgatatggagaaagttccgtattacaagttcccttctatgactaagctccgccgcgcgcgataatttatcctagtttgcgcgctatattttgttttctatcgcgtattaaatgtataattgcgggaccgtcagcctgctcatgaagctaatgaggagtatattgccaagtacaatctggcgattagtcgaatgaaagatcttgataagacacaacctttaaacccta

SEQ ID NO: 687 - DNA, 523 bp, Artificial
  Mutation introduced by TALE nuclease pair POT32_T02 within a POT32 allele
gcaagcttgtgcaatagtagtagtacatctctcaaaactccttttacttcttcctccacttctttaacttccactcctaagccctctcaacttttcatccatggaaaacgtaaccaaatgttcaaagtttcatgcaaggttaccaataataacggtgaccaaaaccaaaacgttgaaacgaattctgttgatcgaagaaatgttcttcttggcttaggtggtctttatggtgttgctaatgctataccattagctgcatccgctgctccagctccacctcctgatctctcgtcttgtagtatagccaggattaacgaaaatcaggtggtgccgtacagttgttgcgcgcctaagcctgatgatatggagaaagttccgtattacaagttcccttctatgactaagctccgtgttctcccgagaggtcacaattgccgcgagcaaagatattaatgttcgtcagcctgctcatgaagctaatgaggagtatattgccaagtacaatctggcgattagtcgaatg

SEQ ID NO: 688 - DNA, 608 bp, Artificial
  Mutation introduced by TALE nuclease pair POT32_T02 within a POT32 allele
gcaagcttgtgcaatagtagtagtacatctctcaaaactccttttacttcttcctccacttctttatcttccactcctaagccctctcaacttttcatccatggaaaacgtaaccaaatgttcaaagtttcatgcaaggttatcaataataacggtgaccaaaacgttgaaacgaattctgttgatcgaagaaatgttcttcttggcttaggtggtctttatggtgttgctaatgctataccattagctgcatccgctgctccaactccacctcctgatctctcgtcttgtagtatagccaggattaacgaaaatcaggtggtgccgtacagttgttgcgcgcctaagcctgatgatatggagaaagttccgtattacaagttcccttctatgactaagctccgtcgtacttcagcttgtgcctcaactcggatttcttctcctccagctcggacttcaccgcgggtttctggagtttaatgagctgttgccggtgctgtgccaggcccacggcttgacccgtcagctgctcatgaagctaatgaggagtatattgccaagtacaatctggcgattagtcgaatgagagatcttgataagacacaacc

SEQ ID NO: 689 - DNA, 521 bp, Artificial
  Mutation introduced by TALE nuclease pair POT32_T02 within a POT32 allele
gcaagcttgtgcaatagtagtagtacatctctcaaaactccttttacttcttcctccacttctttatcttccactcctaagcccctctcaacttttcatccatggaaaacgtaaccaaatgttcaaagtttcatgcaaggttatcaataataacggtgaccaaaacgttgaaacgaattctgttgatcgaagaaatgttcttcttggcttaggtggtctttatggtgttgctaatgctataccattagctgcatccgctgctccagctccacctcctgatctctcgtcttgtagtatagccaggattaacgaaaatcaggtggtgccgtacagttgttgcgcgcctaagcctgatgatatggagaaagttccgtattacaagttcccttctatgactaagctccgtgtggctgttgccggtgctgtgccaggcccgtcagcctgctcatgaagctaatgaggagtatattgccaagtacaatctggcgattagtcgaatgaaagatcttgataagacacaa

SEQ ID NO: 690 - DNA, 469 bp, Artificial; identical to SEQ ID NO: 567
  Mutation introduced by TALE nuclease pair POT32_T02 within a POT32 allele

SEQ ID NO: 691 - DNA, 581 bp, Artificial
  Mutation introduced by TALE nuclease pair POT32_T02 within a POT32 allele
gcaagcttgtgcaatagtagtagtacatctctcaaaactccttttacttcttcctccacttctttatcttccactcctaagcccctctcaacttttcatccatggaaaacgtaaccaaatgttcaaagtttcatgcaaggttaccaataataacggtgaccaaaaccaaaacgttgaaacaaattctgttgatcgaagaaatgtttttcttggcttaggtggtctttaggtgttgctaatgctataccattagctgcatccgctgctccagctccacctcctgatctctcgtcttgtagtatagccaggattaacgaaaatcaggtggtgccgtacagttgttgcgcgcctaagcctgatgatatggagaaagttccgtattacaagttcccttctatgactaagctccgccgcgcgcgataatttatcctagttttgcgcgctatattttgtttttctatcgcgtattaaatgtataattgcggggaccgtcagcctgctcatgaagctaatgaggagtatattgccaagtacaatctggcgattagtcgaatgaaagatcttgataagacacaaccttt

SEQ ID NO: 692 - DNA, 547 bp, Artificial
  Mutation introduced by TALE nuclease pair POT32_T02 within a POT32 allele
gcaagcttgtgcaatagttgtagtacatccctcaaaactccttttacttcttcctccacttctttaacttccactcctaaaccctctcaacttttcatccatggaaaacgtaaccaaatgttcaaagtttcatgcatggttaccaataataacggtgaccaaaaccaaaacgttgaaacgaattctgttgatcgaagaaatgttcttcttggcttaggtggtctttatggtgttgctaatgctataccattagctgcatccgctactccatctccacctcctgatctctcgtcttgtagtatagccaggattaacgaaactcatgtggtgccgtacagttgttgcgcgcctaagcctgatgatatggagaaagttccgtattacaagttcccttctatgactaagctccgaactcacgttaaggggatttttggtcatgagattaagtaagttggccgcagtgttatcactcatggttcgtcagcctgctcatgaagctaatgaggagtatattgccaagtacaatctggcgattagtcgaatgaaa

SEQ ID NO: 693 - DNA, 596 bp, Artificial
  Mutation introduced by TALE nuclease pair POT32_T02 within a POT32 allele
gcaagcttgtgcaatagttgtagtacatccctcaaaactccttttacttcttcctccacttctttaacttccactcctaaaccctctcaacttttcatccatggaaaacgtaaccaaatgttcaaagtttcatgcatggttaccaataataacggtgaccaaaaccaaaacgttgaaacgaattctgttgatcgaagaaatgttcttcttggcttaggtggtctttatggtgttgctaatgctataccattagctgcatccgctactccatctccacctcctgatctctcgtcttgtagtatagccaggattaacgaaactcagtggtgccgtacagttgttgcgcgcctaagcctgatgatatggagaaagttccgtattacaagttcccttctatgactaagctcccgagtccaacccggtaaagacacgacttatcgccactggcagcagccactggtaacaggattagcagagcgaggtatgtaggcggtgctacagagttcttgaagtggtggcctaactacttattgccaagtacaatctggcgattagtcgaatgagagatcttgataagacacaacctttaaacccta

SEQ ID NO: 694 - DNA, 618 bp, Artificial
  Mutation introduced by TALE nuclease pair POT32_T02 within a POT32 allele
gcaagcttgtgcaatagtagtagtacatctctcaaaactccttttacttcttcctccacttctttatcttccactcctaagccctctcaacttttcatccatggaaaacgtaaccaaatgttcaaagtttcatgcaaggttatcaataataacggtgaccaaaacgttgaaacgaattctgttgatcgaagaaatgttcttcttggcttaggtggtctttatggtgttgctaatgctataccattagctgcatccgctgctccaactccacctcctgatctctcgtcttgtagtatagccaggattaacgaaaatcaggtggtgccgtacagttgttgcgcgcctaagcctgatgatatggagaaagttccgtattacaagttcccttctatgactaagctccgtcgtacttcagcttgtgcctcaactcggatttcttctcctccagctcggacttcaccgcggggtttctggagtttaatgagctgttgccggtgctgtgccaggcccacggcttgacccgtcagctgctcatgaagctaatgaggagtatattgccaagtacaatctggcgattagtcgaatgagagatcttgataagacacaacctttaaaccc

SEQ ID NO: 695 - DNA, 609 bp, Artificial
  Mutation introduced by TALE nuclease pair POT32_T02 within a POT32 allele
gcaagcttgtgcaatagtagtagtacatccctcaaaactccttttacttcttcctccacttctttaacttccactcctaaaccctctcaacttttcatccatggaaaacgtaaccaaatgttcaaagtttcatgcatggttaccaataataacggtgaccaaaaccaaaacgttgaaacgaattctgttgatcgaagaaatgttcttcttggcttaggtggtctttatggtgttgctaatgctataccattagctgcatccgctactccatctccacctcctgatctctcgtcttgtagtatagccaggattaacgaaactcatgtggtgccgtacagttgttgcgcgcctaagcctgatgatatggagaaagttccgtattacaagttcccttctatgactaagctccgtggggttacatcgaactggatctcaacagcggtaagatccttgagagttttcgcccgaagaacgtttttccaatgatgagcacttttaaagttctgcttcgtcagcctgctcatgaagctaatgaggagtatattgccaagtacaatttggcggttagcaagatgagggatcttgataagacacaacctttaaacccta

SEQ ID NO: 696 - DNA, 565 bp, Artificial
  Mutation introduced by TALE nuclease pair POT32_T02 within a POT32 allele
gcaagcttgtgcaatagttgtagtacatccctcaaaactccttttacttcttcctccacttctttaacttccactcctaaaccctctcaacttttcatccatggaaaacgtaaccaaatgttcaaagtttcatgcatggttaccaataataacggtgaccaaaaccaaaacgttgaaacgaattctgttgatcgaagaaatgttcttcttggcttaggtggtctttatggtgttgctaatgctataccattagctgcatccgctactccatctccacctcctgatctctcgtcttgtagtatagccaggattaacgaaactcatgtggtgccgtacagttgttgcgcgcctaagcctgatgatatggagaaagttccgtattacaagttcccttctatgactaagctccgaactcacgttaaggggatttttggtcatgagattaagtaagttggccgcagtgttatcactcatggttcgtcagcctgctcatgaagctaatgaggagtatattgccaagtacaatctggcgattagtcgaatgaaagatcttgataagacacaa

SEQ ID NO: 697 - DNA, 589 bp, Artificial
  Mutation introduced by TALE nuclease pair POT32_T02 within a POT32 allele
gcaagcttgtgcaatagtagtagtacatctctcaaaactccttttacttcttcctccacttctttaacttccactcctaagccctctcaacttttcatccatggaaaacgtaaccaaatgttcaaagtttcatgcaaggttaccaataataacggtgaccaaaaccaaaacgttgaaacgaattctgttgatcgaagaaatgttcttcttggcttaggtggtctttatggtgttgctaatgctataccattagctgcatccgctgctccagctccacctcctgatctctcgtcttgtagtatagccaggattaacgaaaatcaggtggtgccgtacagttgttgcgcgcctaagcctgatgatatggagaaagttccgtattacaagttcccttctatgactaagctccggctggcgatggccaccacctgctggggggtcaagccgtggggcctggcacagcaccggcaacagcgcctgcaccgtctccagcgcctgcttcgtcagcctgctcatgaagctaatgaggagtatattgcccaagtacaatctggcgattagtcgaatgaaagatcttgataagacacaa

SEQ ID NO: 698 - DNA, 593 bp, Artificial
  Mutation introduced by TALE nuclease pair POT32_T02 within a POT32 allele
gcaagcttgtgcaatagtagtagtacatctctcaaaactccttttacttcttcctccacttctttatcttccactcctaagccctctcaacttttcatccatggaaaacgtaaccaaatgttcaaagtttcatgcaaggttaccaataataacggtgaccaaaaccaaaacgttgaaacgaattctgttgatcgaagaaatgttcttcttggcttaggtggtctttatggtgttgctaatgctataccattagctgcatccgctgctccagctccacctcctgatctctcgtcttgtagtatagccaggattaacgaaaatcaggtggtgccgtacagttgttgcgcgcctaagcctgatgatatggagaaagttccgtattacaagttcccttctatgactaagctccgtgatcctgttgacgaggggtgtctccctcaaacttgacttcagcacgtgtcttgtagttcccgtcgtccttgaagaagatggtcgtcagcctgctcatgaagctaatgaggagtatattgccaagtacaatttggcggttagcaagatgagggatcttgataagacacaacctttaaacccta

SEQ ID NO: 699 - DNA, 570 bp, Artificial
  Mutation introduced by TALE nuclease pair POT32_T02 within a POT32 allele
gcaagcttgtgcaatagttgtagtacatccctcaaaactccttttacttcttcctccacttctttaacttccactcctaaaccctctcaacttttcatccatggaaaacgtaaccaaatgttcaaagtttcatgcatggttaccaataataacggtgaccaaaaccaaaacgttgaaacgaattctgttgatcgaagaaatgttcttcttggcttaggtggtctttatggtgttgctaatgctataccattagctgcatccgctactccatctccacctcctgatctctcgtcttgtagtatagccaggattaacgaaactcatgtggtgccgtacagttgttgcgcgcctaagcctgatgatatggagaaagttccgtattacaagttcccttctatgactaagctccgaactcacgttaaaggggattttggtcatgagattaagtaagttggccgcagtgttatcactcatggttcgtcagcctgctcatgaagctaatgaggagtatattgccaagtacaatctggcgattagtcgaatgaaagatcttgataagacacaaccttt

SEQ ID NO: 700 - DNA, 619 bp, Artificial
  Mutation introduced by TALE nuclease pair POT32_T02 within a POT32 allele
gcaagcttgtgcaatagtagtagtacatctctcaaaactccttttacttcttcctccacttctttatcttccactcctaagcccctctcaacttttcatccatggaaaacgtaaccaaatgttcaaagtttcatgcaaggttatcaataataacggtgaccaaaacgttgaaacgaattctgttgatcgaagaaatgttcttcttggcttaggtggtctttatggtgttgctaatgctataccattagctgcatccgctgctccaactccacctcctgatctctcgtcttgtagtatagccaggattaacgaaaatcaggtggtgccgtacagttgttgcgcgcctaagcctgatgatatggagaaagttccgtattacaagttcccttctatgactaagctccgtcgtacttcagcttgtgcctcaactcggatttcttctcctccagctcggacttcaccgcggggtttctggagtttaatgagctgttgccggtgctgtgccaggcccacggcttgacccgtcagctgctcatgaagctaatgaggagtatattgccaagtacaatctggcgattagtcgaatgagagatcttgataagacacaacctttaaaccc

SEQ ID NO: 701 - DNA, 548 bp, Artificial
  Mutation introduced by TALE nuclease pair POT32_T02 within a POT32 allele
gcaagcttgtgcaatagtagtagtacatctctcaaaactccttttacttcttcctccactttctttaacttccactcctaagccctctcaacttttcatccatggaaaacgtaaccaaatgttcaaagtttcatgcaaggttaccaataataacggtgaccaaaaccaaaacgttgaaacgaattctgttgatcgaagaaatgttcttcttggcttaggtggtctttatggtgttgctaatgctataccattagctgcatccgctgctccagctccacctcctgatctctcgtcttgtagtatagccaggattaacgaaaatcaggtggtgccgtacagttgttgcgcgcctaagcctgatgatatggagaaagttccgtattacaagttcccttctatgactaagctccggctggcgatggccaccacctgctgggggggtcaagccgtggggcctggcacagcaccggcaacagcgcctgcaccgtctccagcgcctgcttcgtcagcctgctcatgaagctaatgaggagtatattgccaagtac

SEQ ID NO: 702 - DNA, 553 bp, Artificial
  Mutation introduced by TALE nuclease pair POT32_T02 within a POT32 allele
gcaagcttgtgcaatagttgtagtacatccctcaaaactccttttacttcttcctccacttctttaacttccactcctaaaccctctcaacttttcatccatggaaaacgtaaccaaatgttcaaagtttcatgcatggttaccaataataacggtgaccaaaaccaaaacgttgaaacgaattctgttgatcgaagaaatgttcttcttggcttaggtggtctttatggtgttgctaatgctataccattagctgcatccgctactccatctccacctcctgatctctcgtcttgtagtatagccaggattaacgaaactcatgtggtgccgtacagttgttgcgcgcctaagcctgatgatatggagaaagttccgtattacaagttcccttctatgactaagctccgaactcacgttaaggggattttggtcatgagattaagtaagttggccgcagtgttatcactcatggttcgtcagcctgcctcatgaagctaatgaggagtatattgccaagtacaatctggcgattagtcgaatgaaagatctt

SEQ ID NO: 703 - DNA, 499 bp, Artificial; identical to SEQ ID NO: 590
  Mutation introduced by TALE nuclease pair POT32_T02 within a POT32 allele

SEQ ID NO: 704 - DNA, 537 bp, Artificial
  Mutation introduced by TALE nuclease pair POT32_T02 within a POT32 allele
gcaagcttgtgcaatagtagtagtacatctctcaaaactccttttacttcttcctccacttctttaacttccactcctaagcccctctcaacttttcatccatggaaaacgtaaccaaatgttcaaagtttcatgcaaggttaccaataataacggtgaccaaaaccaaaacgttgaaacgaattctgttgatcgaagaaatgttcttcttggcttaggtggtctttatggtgttgctaatgctataccattagctgcatccgctgctccagctccacctcctgatctctcgtcttgtagtatagccaggattaacgaaaatcaggtggtgccgtacagttgttgcgcgcctaagcctgatgatatggagaaagttccgtattacaagttcccttctatgactaagctccgtgttgtgcaaaaagcggttagctccttcggtcctcgtcagcctgctcatgaagctaatgaggagtatattgccaagtacaatctggcgattagtcgaatgaaagatcttgataagacacaaccttt

SEQ ID NO: 705 - DNA, 583 bp, Artificial
  Mutation introduced by TALE nuclease pair POT32_T02 within a POT32 allele
gcaagcttgtgcaatagttgtagtacatccctcaaaactccttttacttcttcctccacttctttaacttccactcctaaaccctctcaacttttcatccatggaaaacgtaaccaaatgttcaaagtttcatgcatggttaccaataataacggtgaccaaaaccaaaacgttgaaacgaattctgttgatcgaagaaatgttcttcttggcttaggtggtctttatggtgttgctaatgctataccattagctgcatccgctactccatctccacctcctgatctctcgtcttgtagtatagccaggattaacgaaactcatgtggtgccgtacagttgttgcgcgcctaagcctgatgatatggagaaagttccgtattacaagttcccttctatgactaagctccgaactcacgttaaggggattttggtcatgagattaagtaagttggccgcagtgttatcactcatggttcgtcagcctgctcatgaagctaatgaggagtatattgccaagtacaatctggcgattagtcgaatgaaagatcttgataagacacaacctttaaaccctattggtt

SEQ ID NO: 706 - DNA, 580 bp, Artificial
  Mutation introduced by TALE nuclease pair POT32_T02 within a POT32 allele
gcaagcttgtgcaatagtagtagtacatctctcaaaactccttttacttcttcctccacttctttatcttccactcctaagcccctctcaacttttcatccatggaaaacgtaaccaaatgttcaaagtttcatgcaaggttaccaataataacggtgaccaaaaccaaaacgttgaaacaaaattctgttgatcgaagaaatgtttttcttggcttaggtggtctttatggtgttgctaatgctataccattagctgcatccgctgctccagctccacctcctgatctctcgtcttgtagtatagccaggattaacgaaaatcaggtggtgccgtacagttgttgcgcgcctaagcctgatgatatggagaaagttccgtattacaagttcccttctatgactaagctccgccgcgcgcgataatttatcctagtttgcgcgctatattttgttttctatcgcgtattaaatgtataattgcgggaccgtcagcctgctcatgaagctaatgaggagtatattgccaagtacaatctggcgattagtcgaatgaaagatcttgataagacacaaccttt

SEQ ID NO: 707 - DNA, 557 bp, Artificial
  Mutation introduced by TALE nuclease pair POT32_T02 within a POT32 allele
  misc_feature (512): n is a or c or t or g
gcaagcttgtgcaatagttgtagtacatccctcaaaactccttttacttcttcctccacttctttaacttccactcctaaacccctctcaacttttcatccatggaaaacgtaaccaaatgttcaaagtttcatgcatggttaccaataataacggtgccaaaaccaaaacgttgaaacgaattctgttgatcgaagaaatgttcttcttggcttaggtggtctttatggtgttgctaatgctataccattagctgcatccgctactccatctccacctcctgatctctcgtcttgtagtatagccaggattaacgaaactcatgtggtgccgtacagttgttgcgcgcctaagcctgatgatatggagaaagttccgtattacaagttcccttctatgactaagctccgaaactcacgttaaaggggatttttggtcatgagattaagtaagttggccgcagtgttatcactcatggttcgtcagcctgctcatgaagctaatgaggagtntattgcccaaagtacaatctggcgattagtcgaatgaaagatctt

SEQ ID NO: 708 - DNA, 596 bp, Artificial
  Mutation introduced by TALE nuclease pair POT32_T02 within a POT32 allele
gcaagcttgtgcaatagttgtagtacatccctcaaaactccttttacttcttcctccacttctttaacttccactcctaaaccctctcaacttttcatccatggaaaacgtaaccaaatgttcaaagtttcatgcatggttaccaataataacggtgaccaaaaccaaaacgttgaaacgaattctgttgatcgaagaaatgttcttcttggcttaggtggtctttatggtgttgctaatgctataccattagctgcatccgctactccatctccacctcctgatctctcgtcttgtagtatagccaggattaacgaaactcatgtggtgccgtacagttgttgcgcgcctaagcctgatgatatggagaaagttccgtattacaagttcccttctatgactaagctcccgagtccaacccggtaagacacgacttatcgccactggcagcagccactggtaacaggattagcagagcgaggtatgtaggcggtgctacagagttcttgaagtggtggcctaactacttattgccaagtacaatctggcgattagtcgaatgagagatcttgataagacacaacctttaaacccta

SEQ ID NO: 709 - DNA, 574 bp, Artificial
  Mutation introduced by TALE nuclease pair POT32_T02 within a POT32 allele
gcaagcttgtgcaatagtagtagtacatctctcaaaactccttttacttcttcctccacttctttatcttccactcctaagcccctctcaacttttcatccatggaaaacgtaaccaaatgttcaaagtttcatgcaaggttaccaataataacggtgaccaaaaccaaaacgttgaaacaaattctgttgatcgaagaaatgtttttcttggcttaggtggtctttatggtgttgctaatgctataccattagctgcatccgctgctccagctccacctcctgatctctcgtcttgtagtatagccaggattaacgaaaatcaggtggtgccgtacagttgttgcgcgcctaagcctgatgatatggagaaagttccgtattacaagttcccttctatgactaagctccgccgcgcgcgataatttatcctagtttgcgcgctatattttgttttctatcgcgtattaaatgtataattgcgggaccgtcagcctgctcatgaagctaatgaggagtatattgccaagtacaatctggcgattagtcgaatgaaagatcttgataagacacaa

SEQ ID NO: 710 - DNA, 564 bp, Artificial
  Mutation introduced by TALE nuclease pair POT32_T02 within a POT32 allele
gcaagcttgtgcaatagttgtagtacatccctcaaaactccttttacttcttcctccacttctttaacttccactcctaaaccctctcaacttttcatccatggaaaacgtaaccaaatgttcaaagtttcatgcatggttaccaataataacggtgaccaaaaccaaaacgttgaaacgaattctgttgatcgaagaaatgttcttcttggcttaggtggtctttatggtgttgctaatgctataccattagctgcatccgctactccatctccacctcctgatctctcgtcttgtagtatagccaggattaacgaaactcatgtggtgccgtacagttgttgcgcgcctaagcctgatgatatggagaaagttccgtattacaagttcccttctatgactaagctccgaactcacgttaaggggattttggtcatgagattaagtaagttggccgcagtgttatcactcatggttcgtcagcctgctcatgaagctaatgaggagtatattgccaagtacaatctggcgattagtcgaatgaaagatcttgataagacacaa

SEQ ID NO: 711 - DNA, 573 bp, Artificial
  Mutation introduced by TALE nuclease pair POT32_T02 within a POT32 allele
gcaagcttgtgcaatagttgtagtacatccctcaaaactccttttacttcttcctccacttctttaacttccactcctaaaccctctcaacttttcatccatggaaaacgtaaccaaatgttcaaagtttcatgcatggttaccaataataacggtgaccaaaaccaaaacgttgaaacgaattctgttgatcgaagaaatgttcttcttggcttaggtggtctttatggtgttgctaatgctataccattagctgcatccgctactccatctccacctcctgatctctcgtcttgtagtatagccaggattaacgaaactcatgtggtgccgtacagttgttgcgcgcctaagcctgatgatatggagaaagttccgtattacaagttcccttctatgactaagctccgaactcacgttaaggggatttttggtcatgagattaagtaagttggccgcagtgttatcactcatggttcgtcagcctgctcatgaagctaatgaggagtatattgccaagtacaatctggcgattagtcgaatgaaagatcttgataagacacaacctttaaa

SEQ ID NO: 712 - DNA, 471 bp, Artificial
  Mutation introduced by TALE nuclease pair POT32_T03 within a POT32 allele
gcaagcttgtgcaatagtagtagtacatctctcaaaactccttttacttcttcctccacttctttatcttccactcctaagcccctctcaacttttcaatccattggaaaacgataaccaaatgttcaaagtttcaatgcaaggttatcaataataacggtgaccaaaacgttgaaacgaattctgttgatcgaagaaatgttcttcttggcttaggtggtctttatggtgttgctaatgctataccattagctgcatccgctgctccaactccacctcctgatctctcgtcttgtagtatagccaggattaacgaaaatcaggtggtgccgtacagttgttgcgcgcctaagcctgatgatatggagaaagttccgtattacaagttcccttctatgactaagctccgtgttcgtcagcctgctcagctaatgaggagtatattgccaagtacaatctggcgattagtcg

SEQ ID NO: 713 - DNA, 517 bp, Artificial
  Mutation introduced by TALE nuclease pair POT32_T03 within a POT32 allele
gcaagcttgtgcaatagtagtagtacatctctcaaaactccttttacttcttcctccacttctttatcttccactcctaagccctctcaacttttcatccatggaaaacgtaaccaaatgttcaaagtttcatgcaaggttaccaataataacggtgaccaaaaccaaaacgttgaaacaaattctgttgatcgaagaaatgttcttcttggcttaggtggtctttatggtgttgctaatgctataccattagctgcatccgctgctccagctccacctcctgatctctcgtcttgtagtatagccaggattaacgaaaatcaggtggtgccgtacagttgttgcgcgcctaagcctgatgatatggagaaagttccgtattacaagttcccttctatgactaagctccgtgttcgtcagcctgctcatgataatgaggagtatattgccaagtacaatctggcgattagtcgaatgaaagatcttgataagacacaacctttaaaccctattggtt

SEQ ID NO: 714 - DNA, 514 bp, Artificial
  Mutation introduced by TALE nuclease pair POT32_T03 within a POT32 allele
gcaagcttgtgcaatagtagtagtacatctctcaaaactccttttacttcttcctccacttctttaacttccactcctaagccctctcaacttttcatccatggaaaacgtaaccaaatgttcaaagtttcatgcaaggttaccaataataacggtgaccaaaaccaaaacgttgaaacgaattctgttgatcgaagaaatgttcttcttggcttaggtggtctttatggtgttgctaatgctataccattagctgcatccgctgctccagctccacctcctgatctctcgtcttgtagtatagccaggattaacgaaaatcaggtggtgccgtacagttgttgcgcgcctaagcctgatgatatggagaaagttccgtattacaagttcccttctatgactaagctccgtgttcgtcagcctgaagctaatgaggagtatattgccaagtacaatttggcggttagcaagatgagggatcttgataagacacaacctttaaaccctattggtt

SEQ ID NO: 715 - DNA, 486 bp, Artificial
  Mutation introduced by TALE nuclease pair POT32_T03 within a POT32 allele
gcaagcttgtgcaatagttgtagtacatccctcaaacatccttttacttcttcctccacttctttatcttccactcctaagcccctctcaacttttcatccattggaaaacgataaccaatgttcaagtttcaatgcaaggttaccaataataacggtgaccaaaaccaaaacagttgaaacgaattctgttgatcgaagaaatgttcttcttggcttaggtggtctttatggtgttgctaatgctataccattagctgcatccgctgctccagctccacctcctgatctctcgtcttgtagtatagcccaggatttaacgaaaatcaggtggtgccgtacagttgttgcgcgcctaagcctgatgatatggagaaagttccgtattacaagttcccttctatgactaagctccgtcccgttcgtcagcctgctcatgaatgaggagtatattgccaagtacaattttgggcgggttagcaagatg

SEQ ID NO: 716 - DNA, 514 bp, Artificial
  Mutation introduced by TALE nuclease pair POT32_T03 within a POT32 allele
gcaagcttgtgcaatagttgtagtacatctctcaaaactccttttacttcttcctccacttctttaacttccactcctaaaccctctcaacttttcatccatggaaaacgtaaccaaatgttcaaagtttcatgcaaggttaccaataataacggtgaccaaaaccaaaacgttgaaacgaattctgttgatcgaagaaatgttcttcttggcttaggtggtctttatggtgttgctaatgctataccattagctgcatccgctactccatctccacctcctgatctctcgtcttgtagtatagccaggattaacgaaactcatgtggtgccgtacagttgttgcgcgcctaagcctgatgatatggagaaagttccgtattacaagttcccttctatgactaagctccgtgttcgtcagcctgctcataatgaggagtatattgccaagtacaatttggcggttagcaagatgagggatcttgataagacacaacctttaaaccctattggtt

SEQ ID NO: 717 - DNA, 479 bp, Artificial
  Mutation introduced by TALE nuclease pair POT32_T03 within a POT32 allele
gcaagcttgtgcaatagtagtagtacatctctcaaaactccttttacttcttcctccacttctttatcttccactcctaagcccctctcaacttttcatccattggaaaacgtaaccaaatgttcaaagtttcatgcaaggttatcaataataacggtgaccaaaacgttgaaacgaattctgttgatcgaagaaatgttcttcttggcttaggtggtctttatggtgttgctaatgctataccattagctgcatccgctgctccaactccacctcctgatctctcgtcttgtagtatagccaggattaacgaaaatcaggtggtgccgtacagttgttgcgcgcctaagcctgatgatatggagaaagttccgtattacaagttcccttctatgactaagctccgtgttcgtcaagtacaatctggcgattagtcgaatgagagatcttgataagacacaacctttaaaccctattgg

SEQ ID NO: 718 - DNA, 469 bp, Artificial
  Mutation introduced by TALE nuclease pair POT32_T03 within a POT32 allele
gcaagcttgtgcaatagtagtagtacatctctcaaaactccttttacttcttcctccacttctttatcttccactcctaagcccctctcaacttttcatccatggaaaacgtaaccaaatgttcaaagtttcatgcaaggttatcaataataacggtgaccaaaacgttgaaacgaattctgttgatcgaagaaatgttcttcttggcttaggtggtctttatggtgttgctaatgctataccattagctgcatccgctgctccaactccacctcctgatctctcgtcttgtagtatagccaggattaacgaaaatcaggtggtgccgtacagttgttgcgcgcctaagcctgatgatatggagaaagttccgtattacaagttcccttctatgactaagctccgtgttcgtcaagtacaatctggcgattagtcgaatgagagatcttgataagacacaacctttaaa

SEQ ID NO: 719 - DNA, 468 bp, Artificial
  Mutation introduced by TALE nuclease pair POT32_T03 within a POT32 allele
gcaagcttgtgcaatagttgtagtacatctctcaaaactccttttacttcttcctccacttctttaacttccactcctaaaccctctcaacttttcatccatggaaaacgtaaccaaatgttcaaagtttcatgcaaggttaccaataataacggtgaccaaaaccaaaacgttgaaacgaattctgttgatcgaagaaatgttcttcttggcttaggtggtctttatggtgttgctaatgctataccattagctgcatccgctactccactccacctcctgatctctcgtcttgtagtatagccaggattaacgaaaactcatgtggtgccgtacagttgttgcgcgcctaagcctgatgatatggagaaagttccgtattacaagttcccttctatgactaagctccgtgttcgtcagcctgctcgctaatgaggagtatattgccaagtacaattgcgttgcgat

SEQ ID NO: 720 - DNA, 511 bp, Artificial
  Mutation introduced by TALE nuclease pair POT32_T03 within a POT32 allele
  misc_feature (154): n is a or c or t or g
gcaagcttgtgcatagtagtagtacatctctcaaaactccttttacttcttcctccacttctttatcttccactcctaagcccctctcaacttttcatccatggaaaacgtaaccaaatgttcaaagtttcatgcaaggttacataataacagngcgaaaccaaaacagttgaaacaaattctgttgatcgaagaaatgttcttcttggcttaggtggtctttatggtgttgctaatgctataccattagctgcatccgctgctccaactccacctcctgatctctcgtcttgtagtatagccaggattaacgaaaatcaggtggtgccgtacagttgttgcgcgcctaagcctgatgatatggagaaagttccgtattacaagttcccttctatgactaagctccgtgttcgtcagcctgctcctaatgaggagtatattgccaagtacaatctggcgattagtcgaatgagagatcttgataagacacaacctttaaaccctattggtt

SEQ ID NO: 721 - DNA, 490 bp, Artificial
  Mutation introduced by TALE nuclease pair POT32_T03 within a POT32 allele
gcaagcttgtgcaatagtagtagtacatctctcaaaactccttttacttcttcctccacttctttatcttccactcctaagcccctctcaacttttcatccatggaaaacgtaaccaaatgttcaaagtttcatgcaaggttatcaataataacggtgaccaaaacgttgaaacgaattctgttgatcgaagaaatgttcttcttggcttaggtggtctttatggtgttgctaatgctataccattagctgcatccgctgctccaactccacctcctgatctctcgtcttgtagtatagccaggattaacgaaaatcaggtggtgccgtacagttgttgcgcgcctaagcctgatgatatggagaaagttccgtattacaagttcccttctatgactaagctccgtgttcgtcagcctgctcatctaatgaggagtatattgccaagtacaatctggcgattagtcgaatgagagatcttgataagacac

SEQ ID NO: 722 - DNA, 461 bp, Artificial
  Mutation introduced by TALE nuclease pair POT32_T03 within a POT32 allele
gcaagcttgtgcaatagtagtagtacatctctcaaaactccttttacttcttcctccacttctttatcttccactcctaagcccctctcaacttttcatccatggaaaacgtaaccaaatgttcaaagtttcatgcaaggttaccaataataacggtgaccaaaaccaaaacgttgaaacgaattctgttgatcgaagaaatgttcttcttggcttaggtggtctttatggtgttgctaatgctataccattagctgcatccgctactccatctccacctcctgatctctcgtcttgtagtatagccaggattaacgaaactcatgtggtgccgtacagttgttgcgcgcctaagcctgatgatatggagaaagttccgtattacaagttcccttctatgactaagctccgtgttcgtcagcctgctcataatgaggagtatattgccaagtacaattgcg

SEQ ID NO: 723 - DNA, 488 bp, Artificial
  Mutation introduced by TALE nuclease pair POT32_T03 within a POT32 allele
gcaagcttgtgcaatagtagtagtacatctctcaaaactccttttacttcttcctccacttctttatcttccactcctaagcccctctcaacttttcatccatggaaaacgtaaccaaatgttcaaagtttcatgcaaggttatcaataataacggtgaccaaaacgttgaaacgaattctgttgatcgaagaaatgttcttcttggcttaggtggtctttatggtgttgctaatgctataccattagctgcatccgctgctccaactccacctcctgatctctcgtcttgtagtatagccaggattaacgaaaatcaggtggtgccgtacagttgttgcgcgcctaagcctgatgatatggagaaagttccgtattacaagttcccttctatgactaagctccgtgttcgtcagcctgctcaatgaggagtatattgccaagtacaatctggcgattagtcgaatgagagatcttgataagacacaa

SEQ ID NO: 724 - DNA, 476 bp, Artificial
  Mutation introduced by TALE nuclease pair POT32_T03 within a POT32 allele
gcaagcttgtgcaatagtagtagtacatctctcaaaactccttttacttcttcctccacttctttaacttccactcctaagccctctcaacttttcatccatggaaaacgtaaccaaatgttcaaagtttcatgcaaggttaccaataataacggtgaccaaaaccaaaacgttgaaacgaattctgttgatcgaagaaatgttcttcttggcttaggtggtctttatggtgttgctaatgctataccattagctgcatccgctgctccagctccacctcctgatctctcgtcttgtagtatagccaggattaacgaaaatcaggtggtgccgtacagttgttgcgcgcctaagcctgatgatatggagaaagttccgtattacaagttcccttctatgactaagctccgtgttcgtcagcctgctcactaatgaggagtatattgccaagtacaatttggcggttagcaagatga

SEQ ID NO: 725 - DNA, 516 bp, Artificial
  Mutation introduced by TALE nuclease pair POT32_T03 within a POT32 allele
gcaagcttgtgcaatagtagtagtacatctctcaaaactccttttacttcttcctccacttctttatcttccactcctaagcccctctcaacttttcatccatggaaaacgtaaccaaatgttcaaagtttcatgcaaggttatcaataataacggtgaccaaaacgttgaaacgaattactgttgtatcgaagaaaatgttcttcttggcttaggtggtctttatggtgttgctaatgctataccattagctgcatccgctgctccaactccacctcctgatctctcgtcttgtagtatagccaggattaacgaaaatcaggtggtgccgtacagttgttgcgcgcctaagcctgatgatatggagaaagttccgtattacaagttcccttctatgactaagctccgtgttcgtcagcctgctcatggctaatgaggagtatattgccaagtacaatctggcgattagtcgaatgagagatcttgataagacacaacctttaaaccctattggtt

SEQ ID NO: 726 - DNA, 510 bp, Artificial
  Mutation introduced by TALE nuclease pair POT32_T03 within a POT32 allele
  misc_feature (267): n is a or c or t or g
gcaagcttgtgcaatagtagtagtacatctctcaaaactccttttacttcttcctccacttctttacttccactcctaagcccctctcaacttttcatccatggaaaacgtaaccaaatgttcaaagtttcatgcaaggttacataataatagtgacgaaccaaaacgttgaaacaaattctgttgatcgaagaaatgttcttcttggcttaggtggtctttatggtgttgctaatgctataccattagctgcatccgctgctccantccacctcctgatctctcgtcttgtagtatagccaggattaacgaaaatcaggtggtgccgtacagttgttgcgcgcctaagcctgatgatatggagaaagttccgtattacaagttcccttctatgactaagctccgtgttcgtcagcctgctcatagatagaggagtatattgccaagtacaatctggcgattagtcgaatgaagatcttgataagacacaacctttaaaccctattggtt

SEQ ID NO: 727 - DNA, 502 bp, Artificial
  Mutation introduced by TALE nuclease pair POT32_T03 within a POT32 allele
gcaagcttgtgcaatagtagtagtacatctctcaaaactccttttacttcttcctccacttctttatcttccactcctaacgccctctcaacttttcatccatggaaaacgtaaccaaatgttcaaagtttcatgcaaggttatcaataataacggtgaccaaaagcgttgaaacgaattctgttgatcgaagaaatgttcttcttggcttaggtggtctttatggtgttgctaatgctataccattagctgcatccgctgctccaactccacctcctgatctctcgtcttgtagtatagccaggattaacgaaaatcaggtggtgccgtacagttgttgcgcgcctaagcctgatgatatggagaaagttccgtattacaagttcccttctatgactaagctccgtgttcgtcagcctgctaatgaggagtatattgccaagtacaatctggcgattagtcgaatgagagatcttgataagacacaaccctttaaacccta

SEQ ID NO: 728 - DNA, 506 bp, Artificial
  Mutation introduced by TALE nuclease pair POT32_T03 within a POT32 allele
gcaagcttgtgcaatagtagtagtacatctctcaaaactccttttacttcttcctccacttctttatcttccactcctaagccctctcaacttttcatccatggaaaacgtaaccaaatgttcaaagtttcatgcaaggttaccaataataacggtgaccaaaaccaaaacgttgaaacgaattctgttgatcgaagaaatgttcttcttggcttaggtggtctttatggtgttgctaatgctataccattagctgcatccgctgctccagctccacctcctgatctctcgtcttgtagtatagccaggattaacgaaaatcaggtggtgccgtacagttgttgcgcgcctaagcctgatgatatggagaaagttccgtattacaagttcccttctatgactaagctccgtgttcgtcagcctgctcaatgaggagtatattgccaagtacaatttggcggttagcaagatgagggatcttgataagacacaacctttaaacccta

SEQ ID NO: 729 - DNA, 501 bp, Artificial
  Mutation introduced by TALE nuclease pair POT32_T03 within a POT32 allele
gcaagcttgtgcaatagtagtagtacatctctcaaaactccttttacttcttcctccacttctttatcttccactcctaagcccctctcaacttttcatccatggaaaacgtaaccaaatgttcaaagtttcatgcaaggttatcaataataacggtgaccaaaacgttgaaacgaattctgttgatcgaagaaatgttcttcttggcttaggtggtctttatggtgttgctaatgctataccattagctgcatccgctgctccaactccacctcctgatctctcgtcttgtagtatagccaggattaacgaaaatcaggtggtgccgtacagttgttgcgcgcctaagcctgatgatatggagaaagttccgtattacaagttcccttctatgactaagctccgtgttcgtcagcctgctcaatgaggagtatattgccaagtacaatctggcgattagtcgaatgagagatcttgataagacacaacctttaaacccta

SEQ ID NO: 730 - DNA, 508 bp, Artificial
  Mutation introduced by TALE nuclease pair POT32_T03 within a POT32 allele
gcaagcttgtgcaatagtagtagtacatctctcaaaactccttttacttcttcctccacttctttatcttccactcctaagcccctctcaacttttcatccatggaaaacgtaaccaaatgttcaaagtttcatgcaaggttatcaataataacggtgaccaaaacgttgaaacgaattctgttgatcgaagaaatgttcttcttggcttaggtggtctttatggtgttgctaatgctataccattagctgcatccgctgctccaactccacctcctgatctctcgtcttgtagtatagccaggattaacgaaaatcaggtggtgccgtacagttgttgcgcgcctaagcctgatgatatggagaaagttccgtattacaagttcccttctatgactaagctccgtgttcgtcagcctgctcataatgaggagtatattgccaagtacaatctggcgattagtcgaatgagagatcttgataagacacaacctttaaaccctatggtt

SEQ ID NO: 731 - DNA, 493 bp, Artificial
  Mutation introduced by TALE nuclease pair POT32_T03 within a POT32 allele
gcaagcttgtgcaatagtagtagtacatctctcaaaactccttttacttcttcctccacttctttatcttccactcctaagccctctcaacttttcatccatggaaaacgtaaccaaatgttcaaagtttcatgcaaggttaccaataataacggtgaccaaaaccaaaacgttgaaacaaattctgttgatcgaagaaatgttcttcttggcttaggtggtctttatggtgttgctaatgctataccattagctgcatccgctgctccagctccacctcctgatctctcgtcttgtagtatagccaggattaacgaaaatcaggtggtgccgtacagttgttgcgcgcctaagcctgatgatatggagaaagttccgtattacaagttcccttctatgactaagctccgtgttcgtcagcctgctcagctaatgaggagtatattgccaagtacaatctggcgattagtcgaatgaaagatcttgataagac

SEQ ID NO: 732 - DNA, 501 bp, Artificial
  Mutation introduced by TALE nuclease pair POT32_T03 within a POT32 allele
gcaagcttgtgcaatagtagtagtacatctctcaaaactccttttacttcttcctccacttctttatcttccactcctaagcccctctcaacttttcatccatggaaaacgtaaccaaatgttcaaagtttcatgcaaggttatcaataataacggtgaccaaaacgttgaaacgaattctgttgatcgaagaaatgttcttcttggcttaggtggtctttatggtgttgctaatgctataccattagctgcatccgctgctccaactccacctcctgatctctcgtcttgtagtatagccaggattaacgaaaatcaggtggtgccgtacagttgttgcgcgcctaagcctgatgatatggagaaagttccgtattacaagttcccttctatgactaagctccgtgttcgtcagcctgcctaatgaggagtatattgccaagtacaatctggcgattagtcgaatgagagatcttgataagacacaacctttaaacccta

SEQ ID NO: 733 - DNA, 513 bp, Artificial
  Mutation introduced by TALE nuclease pair POT32_T03 within a POT32 allele
gcaagcttgtgcaatagttgtagtacatctctcaaaactccttttacttcttcctccacttctttaacttccactcctaaaccctctcaacttttcatccatggaaaacgtaaccaaatgttcaaagtttcatgcatggttaccaataataacggtgaccaaaaccaaaacgttgaaacgaattctgttgatcgaagaaatgttcttcttggcttaggtggtctttatggtgttgctaatgctataccattagctgcatccgctactccatctccacctcctgatctctcgtcttgtagtatagccaggattaacgaaactcatgtggtgccgtacagttgttgcgcgcctaagcctgatgatatggagaaagttccgtattacaagttcccttctatgactaagctccgtgttcgtcagcctgctcataatgaggagtatattgccaagtacaatctggcgattagtcgaatgaagatcttgataagacacaacctttaaaccctattggtt

SEQ ID NO: 734 - DNA, 494 bp, Artificial
  Mutation introduced by TALE nuclease pair POT32_T03 within a POT32 allele
gcaagcttgtgcaatagagtagtacatccctcaaaactccttttacttcttcctccacttctttaactttaccactcctaaaccctctcaacttttcatccatggaaaacgtaaccaaatgttcaaagtttcatgcaaggttaccaataataacggtgaccaaaaccaaaacgttgaaacgaattctgttgatcgaagaaatgttcttcttggcttaggtggtctttatggtgttgctaatgctataccattagctgcatccgctactccatctccacctcctgatctctcgtcttgtagtatagccaggattaacgaaactcatgtggtgccgtacagttgttgcgcgcctaagcctgatgatatggagaaagttccgtattacaagttcccttctatgactaagctccgtgttcgtcagcctgctcaatgaggagtatattgccaagtacaatttggcggttagcaagatgagggatcttgataagacacaa

SEQ ID NO: 735 - DNA, 460 bp, Artificial
  Mutation introduced by TALE nuclease pair POT32_T03 within a POT32 allele
gcaagcttgtgcaatagtagtagtacatctctcaaaactccttttacttcttcctccacttctttatcttccactcctaagccctctcaacttttcatccatggaaaacgtaaccaaatgttcaaagtttcatgcaaggttaccaataataacggtgaccaaaaccaaaacgttgaaacgaattctgttgatcgaagaaatgttcttcttggcttaggtggtctttatggtgttgctaatgctataccattagctgcatccgctgctccagctccacctcctgatctctcgtcttgtagtatagccaggattaacgaaaatcaggtggtgccgtacagttgttgcgcgcctaagcctgatgatatggagaaagttccgtattacaagttcccttctatgactaagctccgtgttcgtcagcctgctcaaatgaggagtatattgccaagtacaatttggc

SEQ ID NO: 736 - DNA, 518 bp, Artificial
  Mutation introduced by TALE nuclease pair POT32_T03 within a POT32 allele
  misc_feature (272): n is a or c or t or g
gcaagcttgtgcaatagtagtagtacatctctcaaaactccttttacttcttcctccacttctttatcttccactcctaagcccctctcaacttttcatccatggaaaacgtaaccaaatgttcaaagtttcatgcaaggttactacaataataagcggctgaaccaaaacgttgaaacgaattctgttgatcgaagaaatgttcttcttggcttaggtggtctttatggtgttgctaatgctataccattagctgcatccgctgctccaantccacctcctgatctctcgtcttgtagtatagccaggattaacgaaaatcaggtggtgccgtacagttgttgcgcgcctaagcctgatgatatggagaaagttccgtattacaagttcccttctatgactaagctccgtgttcgtcagcctgctcatgcataatgaggagtatattgccaagtacaatctggcgattagtcgaatgaagagtcttgataagacacaacctttaaaccctattggtt

SEQ ID NO: 737 - DNA, 509 bp, Artificial
  Mutation introduced by TALE nuclease pair POT32_T03 within a POT32 allele
gcaagcttgtgcaatagtagtagtacatctctcaaaactccttttacttcttcctccacttctttatcttccactcctaagcccctctcaacttttcatccatggaaaacgtaaccaaatgttcaaagtttcatgcaaggttatcaataataacggtgaccaaaacgttgaaacgaattctgttgatcgaagaaatgttcttcttggcttaggtggtctttatggtgttgctaatgctataccattagctgcatccgctgctccaactccacctcctgatctctcgtcttgtagtatagccaggattaacgaaaatcaggtggtgccgtacagttgttgcgcgcctaagcctgatgatatggagaaagttccgtattacaagttcccttctatgactaagctccgtgttcgtcagcctgctcgaagtgaggagtatattgccaagtacaatctggcgattagtcgaatgagagatcttgataagacacaacctttaaaccctattggtt

SEQ ID NO: 738 - DNA, 506 bp, Artificial
  Mutation introduced by TALE nuclease pair POT32_T03 within a POT32 allele
gcaagcttgtgcaatagttgtagtacatctctcaaaactccttttacttcttcctccacttctttaacttccactcctaaaccctctcaacttttcatccatggaaaacgtaaccaaatgttcaaagtttcatgcaaggttaccaataataacggtgaccaaaaccaaaacgttgaaacgaattctgttgatcgaagaaatgttcttcttggcttaggtggtctttatggtgttgctaatgctataccattagctgcatccgctactccatctccacctcctgatctctcgtcttgtagtatagccaggattaacgaaactcatgtggtgccgtacagttgttgcgcgcctaagcctgatgatatggagaaagttccgtattacaagttcccttctatgactaagctccgtgttcgtcagcctgctcaatgaggagtatattgccaagtacaatttggcggttagcaagatgagggatcttgataagacacaacctttaaacccta

SEQ ID NO: 739 - DNA, 507 bp, Artificial
  Mutation introduced by TALE nuclease pair POT32_T03 within a POT32 allele
gcaagcttgtgcaatagtagtagtacatctctcaaaactccttttacttcttcctccacttctttatcttccactcctaagcccctctcaacttttcatccatggaaaacgtaaccaaatgttcaaagtttcatgcaaggttaccaataataacggtgaccaaaaccaaaacgttgaaacgaattctgttgatcgaagaaatgttcttcttggcttaggtggtctttatggtgttgctaatgctataccattagctgcatccgctgctccagctccacctcctgatctctcgtcttgtagtatagccaggattaacgaaaatcaggtggtgccgtacagttgttgcgcgcctaagcctgatgatatggagaaagttccgtattacaagttcccttctatgactaagctccgtgttcgtcagcctgctcaatgaggagtatattgccaagtacaatttggcggttagcaagatgagggatcttgataagacacaacctttaaacccta

SEQ ID NO: 740 - DNA, 512 bp, Artificial
  Mutation introduced by TALE nuclease pair POT32_T03 within a POT32 allele
gcaagcttgtgcaatagtagtagtacatctctcaaaactccttttacttcttcctccacttctttatcttccactcctaagcccctctcaacttttcatccattggaaaacgtaaccaaatgttcaaagtttcatgcaaggttatcaataataacggtgaccaaaacgttgaaacgaattctgttgatcgaagaaatgttcttcttggcttaggtggtctttatggtgttgctaatgctataccattagctgcatccgctgctccaactccacctcctgatctctcgtcttgtagtatagccaggattaacgaaaatcaggtggtgccgtacagttgttgcgcgcctaagcctgatgatatggagaaagttccgtattacaagttcccttctatgactaagctccgtgttcgtcagcctgctcatgaaatgaggagtatattgccaagtacaatctggcgattagtcgaatgagagatcttgataagacacaacctttaaaccctattggtt

SEQ ID NO: 741 - DNA, 505 bp, Artificial
  Mutation introduced by TALE nuclease pair POT32_T03 within a POT32 allele
gcaagcttgtgcaatagtagtagtacatccctcaaaactccttttacttcttcctccacttctttaacttccactcctaaaccctctcaacttttcatccatggaaaacgtaaccaaatgttcaaagtttcatgcatggttaccaataataacggtgaccaaaaccaaaacgttgaaacgaattctgttgatcgaagaaatgttcttcttggcttaggtggtctttatggtgttgctaatgctataccattagctgcatccgctgctccagctccacctcctgatctctcgccttgtagtatagccaggattaacgaaaatcaggtggtgccgtacagttgttgcgcgcctaagcctgatgatatggagaaagttccgtattacaagttcccttctatgactaagctccgtgttcgtcagcctgctaatgaggagtatattgccaagtacaatctggcgattagtcgaatgaaagatcttgataagacacaacctttaaacccta

SEQ ID NO: 742 - DNA, 510 bp, Artificial
  Mutation introduced by TALE nuclease pair POT32_T03 within a POT32 allele
gcaagcttgtgcaatagtagtagtacatctctcaaaactccttttacttcttcctccacttctttatcttccactcctaagcccctctcaacttttcatccatggaaaacgtaaccaaatgttcaaagtttcatgcaaggttatcaataataacggtgaccaaaacgttgaaacgaattctgttgatcgaagaaatgttcttcttggcttaggtggtctttatggtgttgctaatgctataccattagctgcatccgctgctccaactccacctcctgatctctcgtcttgtagtatagccaggattaacgaaaatcaggtggtgccgtacagttgttgcgcgcctaagcctgatgatatggagaaagttccgtattacaagttcccttctatgactaagctccgtgttcgtcagcctgctcactaatgaggagtatattgccaagtacaatctggcgattagtcgaatgagagatcttgataagacacaacctttaaaccctattggtt

SEQ ID NO: 743 - DNA, 505 bp, Artificial
  Mutation introduced by TALE nuclease pair POT32_T03 within a POT32 allele
gcaagcttgtgcaatagtagtagtacatctctcaaaactccttttacttcttcctccacttctttaacttccactcctaagccctctcaacttttcatccatggaaaacgtaaccaaatgttcaaagtttcatgcaaggttaccaataataacggtgaccaaaaccaaaacgttgaaacgaattctgttgatcgaagaaatgttcttcttggcttaggtggtctttatggtgttgctaatgctataccattagctgcatccgctgctccagctccacctcctgatctctcgtcttgtagtatagccaggattaacgaaaatcaggtggtgccgtacagttgttgcgcgcctaagcctgatgatatggagaaagttccgtattacaagttcccttctatgactaagctccgtgttcgtcagcctgctaatgaggagtatattgccaagtacaatctggcgattagtcgaatgaaagatcttgataagacacaacctttaaacccta

SEQ ID NO: 744 - DNA, 475 bp, Artificial
  Mutation introduced by TALE nuclease pair POT32_T03 within a POT32 allele
gcaagcttgtgcaatagttgtagtacatccctcaaaactccttttacttcttcctccacttctttaacttccactcctaaaccctctcaacttttcatccatggaaaacgtaaccaaatgttcaaagtttcatgcatggttaccaataataacggtgaccaaaaccaaaacgttgaaacgaattctgttgatcgaagaaatgttcttcttggcttaggtggtctttatggtgttgctaatgctataccattagctgcatccgctactccatctccacctcctgatctctcgtcttgtagtatagccaggattaacgaaactcatgtggtgccgtacagttgttgcgcgcctaagcctgatgatatggagaaagttccgtattacaagttcccttctatgactaagctccgtgttcgtcagcctgctcataatgaggagtatattgccaagtacaatttggcggttagcaagatga

SEQ ID NO: 745 - DNA, 412 bp, Artificial
  Mutation introduced by TALE nuclease pair POT32_T03 within a POT32 allele
gcaagcttgtgcaatagttgtagtacatcctcaacaatccttttacttcttcctccacttctttaacttccactcctaaaccctctcaacttttcatccatggaaaacgtaaccaaatgttcaaagtttcatgcatggttaccaataataacggtgaccaaaaccaaaacgttgaaacgaattctgttgatcgaagaaatgttcttcttggcttaggtggtctttatggtgttgctaatgctataccattagctgcatccgctactccatctccacctcctgatctctcgtcttgtagtatagccaggattaacgaaactcatgtggtgccgtacagttgttgcgcgccgagtatattgccaagtacaatttggcggttagcaagatgaggggatcttgataagacacaacc

SEQ ID NO: 746 - DNA, 515 bp, Artificial
  Mutation introduced by TALE nuclease pair POT32_T03 within a POT32 allele
gcaagcttgtgcaatagtagtagtacatcctcaacaatccttttacttcttcctccacttctttaacttccactcctaagcccctctcaacttttcatccatggaaaacgtaaccaaatgttcaaagtttcatgcaaggttaccaataataacggtgaccaaaaccaaaacgttgaaacgaattctgttgatcgaagaaatgttcttcttggcttaggtggtctttatggtgttgctaatgctataccattagctgcatccgctactccatctccacctcctgatctctcgtcttgtagtatagccaggattaacgaaactcatgtggtgccgtacagttgttgcgcgcctaagcctgatgatatggagaaagttccgtattacaagttcccttctatgactaagctccgtgttcgtcagcctgctcactaatgaggagtatattgccaagtacaatttggcggttagcaagatgagggatcttgataagacacaacctttaaaccctattggtt

SEQ ID NO: 747 - DNA, 514 bp, Artificial
  Mutation introduced by TALE nuclease pair POT32_T03 within a POT32 allele
gcaagcttgtgcaatagtagtagtacatctctcaaaactccttttacttcttcctccacttctttaacttccactcctaagcccctctcaacttttcatccatggaaaacgtaaccaaatgttcaaagtttcatgcaaggttaccaataataacggtgaccaaaaccaaaacgttgaaacgaattctgttgatcgaagaaatgttcttcttggcttaggtggtctttatggtgttgctaatgctataccattagctgcatccgctgctccagctccacctcctgatctctcgtcttgtagtatagccaggattaacgaaaatcaggtggtgccgtacagttgttgcgcgcctaagcctgatgatatggagaaagttccgtattacaagttcccttctatgactaagctccgtgttcgtcagcctgctctaatgaggagtatattgccaagtacaatctggcgattagtcgaatgaaagatcttgataagacacaacctttaaaccctattggtt

SEQ ID NO: 748 - DNA, 499 bp, Artificial
  Mutation introduced by TALE nuclease pair POT32_T03 within a POT32 allele
gcaagcttgtgcaatagttgtagtacatccctcaaaactccttttacttcttcctccacttctttaacttccactcctaaaccctctcaacttttcatccatggaaaacgtaaccaaatgttcaaagtttcatgcatggttaccaataataacggtgaccaaaaccaaaacgttgaaacgaattctgttgatcgaagaaatgttcttcttggcttaggtggtctttatggtgttgctaatgctataccattagctgcatccgctactccatctccacctcctgatctctcgtcttgtagtatagccaggattaacgaaactcatgtggtgccgtacagttgttgcgcgcctaagcctgatgatatggagaaagttccgtattacaagttcccttctatgactaagctccgtgttcgtcagcctgaggagtatattgccaagtacaatttggcggttagcaagatgagggatcttgataagacacaacctttaaacccta

SEQ ID NO: 749 - DNA, 497 bp, Artificial
  Mutation introduced by TALE nuclease pair POT32_T03 within a POT32 allele
gcaagcttgtgcaatagtagtagtacatctctcaaaactccttttacttcttcctccacttctttatcttccactcctaagcccctctcaacttttcatccatggaaaacgtaaccaaatgttcaaagtttcatgcaaggttatcaataataacggtgaccaaaacgttgaaacgaattctgttgatcgaagaaatgttcttcttggcttaggtggtctttatggtgttgctaatgctataccattagctgcatccgctactccatctccacctcctgatctctcgtcttgtagtatagccaggattaacgaaactcatgtggtgccgtacagttgttgcgcgcctaagcctgatgatatggagaaagttccgtattacaagttcccttctatgactaagctccgtgttcgtcaagctaatgaggagtatattgccaagtacaatctggcgattagtcgaatgaaagatcttgataagacacaacctttaaacccta

SEQ ID NO: 750 - DNA, 511 bp, Artificial
  Mutation introduced by TALE nuclease pair POT32_T03 within a POT32 allele
gcaagcttgtgcatagtagtagtacatctctcaaaactccttttacttcttcctccacttctttatcttccactcctaagcccctctcaacttttcatccattggaaaacgataaccaaatgttcaaagtttcaatgcaaggttatcaataataacggtgaccaaaacgttgaaacgaattctgttgatcgaagaaatgttcttcttggcttaggtggtctttatggtgttgctaatgctataccattagctgcatccgctgctccaactccacctcctgatctctcgtcttgtagtatagccaggattaacgaaaatcaggtggtgccgtacagttgttgcgcgcctaagcctgatgatatggagaaagttccgtattacaagttcccttctatgactaagctccgtgttcgtcagcctgctgctaatgaggagtatattgccaagtacaatctggcgattagtcgaatgagagatcttgataagacacaacctttaaaccctattggtt

SEQ ID NO: 751 - DNA, 490 bp, Artificial
  Mutation introduced by TALE nuclease pair POT32_T03 within a POT32 allele
gcaagcttgtgcaatagtagtagtacatctctcaaaactccttttacttcttcctccacttctttatcttccactcctaagcccctctcaacttttcatccatggaaaacgtaaccaaatgttcaaagtttcatgcaaggttaccaataataacggtgaccaaaaccaaaacgttgaaacaaattctgttgatcgaagaaatgttcttcttggcttaggtggtctttatggtgttgctaatgctataccattagctgcatccgctgctccagctccacctcctgatctctcgtcttgtagtatagccaggattaacgaaaatcaggtggtgccgtacagttgttgcgcgcctaagcctgatgatatggagaaagttccgtattacaagttcccttctatgactaagctccgtgttcgtcagcctgcgccaagtacaatctggcgattagtcgaatgaaagatcttgataagacacaacctttaaacccta

SEQ ID NO: 752 - DNA, 510 bp, Artificial
  Mutation introduced by TALE nuclease pair POT32_T03 within a POT32 allele
gcaagcttgtgcaatagtagtagtacatctctcaaaactccttttacttcttcctccacttctttaacttccactcctaagcccctctcaacttttcatccatggaaaacgtaaccaaatgttcaaagtttcatgcaaggttaccaataataacggtgaccaaaaccaaaacgttgaaacaattctgttgatcgaagaaatgttcttcttggcttaggtggtctttatggtgttgctaatgctataccattagctgcatccgctgctccagctccacctcctgatctctcgtcttgtagtatagccaggattaacgaaaatcaggtggtgccgtacagttgttgcgcgcctaagcctgatgatatggagaaagttccgtattacaagttcccttctatgactaagctccgtgttcgtcagcctgctcatagatagaggagtatattgccaagtacaatctggcgattagtcgaatgaaagatcttgataagacacaacctttaaacccta

SEQ ID NO: 753 - DNA, 490 bp, Artificial
  Mutation introduced by TALE nuclease pair POT32_T03 within a POT32 allele
gcaagcttgtgcaatagttgtagtacatccctcaacatccttttacttcttcctccacttctttaacttccactcctaaaccctctcaacttttcatccatggaaaacgtaaccaaatgttcaaagtttcatgcatggttaccaataataacggtgaccaaaaccaaaacgttgaaacgaattctgttgatcgaagaaatgttcttcttggcttaggtggtctttatggtgttgctaatgctataccattagctgcatccgctactccatctccacctcctgatctctcgtcttgtagtatagccaggattaacgaaactcatgtggtgccgtacagttgttgcgcgcctaagcctgatgatatggagaaagttccgtattacaagttcccttctatgactaagctccgtgttcgtcagcctgaggagtatattgccaagtacaatttggcggttagcaagatgagggatcttgataagacacaaccttt

SEQ ID NO: 754 - DNA, 512 bp, Artificial
  Mutation introduced by TALE nuclease pair POT32_T03 within a POT32 allele
gcaagcttgtgcaatagtgtagtacatctctcaaaactccttttacttcttcctccacttctttacttccactcctaaccgcctctcaacttttcatccatggaaaacgtaaccaaatgttcaaagtttcatgcaaggttaccaataataacggtgaccaaaaccaaaacgttgaaacaattctgttgatcgaagaaatgttcttcttggcttaggtggtctttatggtgttgctaatgctataccattagctgcatccgctactccagtccacctcctgatctctcgtcttgtagtatagccaggattaacgaaaatcaggtggtgccgtacagttgttgcgcgcctaagcctgatgatatggagaaagttccgtattacaagttcccttctatgactaagctccgtgttcgtcagcctgctcactaatgaggagtatattgccaagtacaatttggcggttagcaagatgagggatcttgataagacacaacctttaaaccctattggtt

SEQ ID NO: 755 - DNA, 493 bp, Artificial
  Mutation introduced by TALE nuclease pair POT32_T03 within a POT32 allele
gcaagcttgtgcaatagtagtagtacatccctcaacaatccttttacttcttcctccacttctttaacttccactcctaaaccctctcaacttttcatccatggaaaacgtaaccaaatgttcaaagtttcatgcaaggttaccaataataacggtgaccaaaaccaaaacgttgaaacgaattctgttgatcgaagaaatgttcttcttggcttaggtggtctttatggtgttgctaatgctataccattagctgcatccgctactccatctccacctcctgatctctcgtcttgtagtatagccaggattaacgaaactcatgtggtgccgtacagttgttgcgcgcctaagcctgatgatatggagaaagttccgtattacaagttcccttctatgactaagctccgtgttcgtcagcctgctcaatgaggagtatattgccaagtacaatttggcggttagcaagatgagggatcttgataagacacaa

SEQ ID NO: 756 - DNA, 514 bp, Artificial
  Mutation introduced by TALE nuclease pair POT32_T03 within a POT32 allele
gcagcttgtgcaatagtagtagtacatctctcaaaactccttttacttcttcctccacttctttatcttccactcctaagccctctcaacttttcatccatggaaaacgtaaccaaatgttcaaagtttcatgcaaggttaccaataataacggtgaccaaaaccaaaacgttgaaacaaattctgttgatcgaagaaatgttcttcttggcttaggtggtctttatggtgttgctaatgctataccattagctgcatccgctgctccagctccacctcctgatctctcgtcttgtagtatagccaggattaacgaaaatcaggtggtgccgtacagttgttgcgcgcctaagcctgatgatatggagaaagttccgtattacaagttcccttctatgactaagctccgtgttcgtcagcctgctcatagatagaggagtatattgccaagtacaatctggcgattagtcgaatgaagatcttgataagacacaacctttaaaccctattggtt

SEQ ID NO: 757 - DNA, 518 bp, Artificial
  Mutation introduced by TALE nuclease pair POT32_T03 within a POT32 allele
gcaagcttgtgcaatagtagtagtacatctctcaaaactccttttacttcttcctccacttctttaacttccactcctaagcccctctcaacttttcatccatggaaaacgtaaccaaatgttcaaagtttcatgcaaggttaccaataataacggtgaccaaaaccaaaacgttgaaacgaattctgttgatcgaagaaatgttcttcttggcttaggtggtctttatggtgttgctaatgctataccattagctgcatccgctgctccagctccacctcctgatctctcgtcttgtagtatagccaggattaacgaaaatcaggtggtgccgtacagttgttgcgcgcctaagcctgatgatatggagaaagttccgtattacaagttcccttctatgactaagctccgtgttcgtcagcctgctcatgataatgaggagtatattgccaagtacaatctggcgattagtcgaatgaaagatcttgataagacacaacctttaaaccctattggtt

SEQ ID NO: 758 - DNA, 516 bp, Artificial
  Mutation introduced by TALE nuclease pair POT32_T03 within a POT32 allele
gcaagcttgtgcaatagttgtagtacatccctcaaaactccttttacttcttcctccacttctttatcttccactcctaagcccctctcaacttttcatccatggaaaacgtaaccaaatgttcaaagtttcatgcaaggttaccaataataacggtgaccaaaaccaaaacgttgaaacgaattctgttgatcgaagaaatgttcttcttggcttaggtggtctttatggtgttgctaatgctataccattagctgcatccgctgctccagctccacctcctgatctctcgtcttgtagtatagccaggattaacgaaaatcaggtggtgccgtacagttgttgcgcgcctaagcctgatgatatggagaaagttccgtattacaagttcccttctatgactaagctccgtgttcgtcagcctgctcatgaatgaggagtatattgccaagtacaatttggcggttagcaagatgagggatcttgataagacacaacctttaaaccctattggtt

SEQ ID NO: 759 - DNA, 483 bp, Artificial
  Mutation introduced by TALE nuclease pair POT32_T03 within a POT32 allele
gcaagcttgtgcaatagtagtagtacatctctcaaaactccttttacttcttcctccacttctttaacttccactcctaagcccctctcaacttttcatccatggaaaacgtaaccaaatgttcaaagtttcatgcaaggttaccaataataacggtgaccaaaaccaaaacgttgaaacgaattctgttgatcgaagaaatgttcttcttggcttaggtggtctttatggtgttgctaatgctataccattagctgcatccgctactccatctccacctcctgatctctcatcttgtagtaaagcaaagattaatgaaactacggaggtgccatacagttgttgcgctcccacgccaaaagatatgaagaaagttccatattacaagttcccttctatgactaagctccgtattcggccaagtacaatctggcgattagtcgaatgaaagatcttgataagacacaacctttaaaccctatt

SEQ ID NO: 760 - DNA, 509 bp, Artificial
  Mutation introduced by TALE nuclease pair POT32_T03 within a POT32 allele
gcaagcttgtgcaatagtagtagtacatctctcaaaactccttttacttcttcctccacttctttatcttccactcctaagcccctctcaacttttcatccatggaaaacgtaaccaaatgttcaaagtttcatgcaaggttatcaataataacggtgaccaaaacgttgaaacgaattctgttgatcgaagaaatgttcttcttggcttaggtggtctttatggtgttgctaatgctataccattagctgcatccgctgctccaactccacctcctgatctctcgtcttgtagtatagccaggattaacgaaaatcaggtggtgccgtacagttgttgcgcgcctaagcctgatgatatggagaaagttccgtattacaagttcccttctatgactaagctccgtgttcgtcagcctgctcataatgaggagtatattgccaagtacaatctggcgattagtcgaatgagagatcttgataagacacaacctttaaaccctattggtt

SEQ ID NO: 761 - DNA, 519 bp, Artificial
  Mutation introduced by TALE nuclease pair POT32_T03 within a POT32 allele
gcaagcttgtgcaatagtagtagtacatctctcaaaactccttttacttcttcctccacttctttaacttccactcctaagccctctcaacttttcatccattggaaaacgtaaccaaatgttcaaagtttcatgcaaggttaccaataataacggtgaccaaaaccaaaacgttgaaacgaattctgttgatcgaagaaatgttcttcttggcttaggtggtctttatggtgttgctaatgctataccattagctgcatccgctgctccagctccacctcctgatctctcgtcttgtagtatagccaggattaacgaaaatcaggtggtgccgtacagttgttgcgcgcctaagcctgatgatatggagaaagttccgtattacaagttcccttctatgactaagctccgtgttcgtcagcctgctcagctaatgaggagtatattgccaagtacaatttggcggttagcaagatgaggggatcttgataagacacaaccttttaaaccctattggtt

SEQ ID NO: 762 - DNA, 514 bp, Artificial
  Mutation introduced by TALE nuclease pair POT32_T03 within a POT32 allele
gcaagcttgtgcatagtagtagtacatctctcaaaactccttttacttcttcctccacttctttatcttccactcctaagccctctcaacttttcatccatggaaaacgtaaccaaatgttcaaagtttcatgcaaggttacataataacagtgaccgaaacccaaaacaagttgaaacaaattctgttgatcgaagaaatgttcttcttggcttaggtggtctttatggtgttgctaatgctataccattagctgcatccgctgctccaactccacctcctgatctctcgtcttgtagtatagccaggattaacgaaaatcaggtggtgccgtacagttgttgcgcgcctaagcctgatgatatggagaaagttccgtattacaagttcccttctatgactaagctccgtgttcgtcagcctgctcctaatgaggagtatattgccaagtacaatctggcgattagtcgaatgagagatcttgataagacacaacctttaaaccctattggtt

SEQ ID NO: 763 - DNA, 514 bp, Artificial
  Mutation introduced by TALE nuclease pair POT32_T03 within a POT32 allele
gcaagcttgtgcaatagttgtagtacatccctcaaacatccttttacttcttcctccacttctttaacttccactcctaaaccctctcaacttttcatccatggaaaacgtaaccaaatgttcaaagtttcatgcatggttaccaataataacggtgaccaaaaccaaaacgttgaaacgaattctgttgatcgaagaaatgttcttcttggcttaggtggtctttatggtgttgctaatgctataccattagctgcatccgctactccatctccacctcctgatctctcgtcttgtagtatagccaggattaacgaaactcatgtggtgccgtacagttgttgcgcgcctaagcctgatgatatggagaaagttccgtattacaagttcccttctatgactaagctccgtgttcgtcagcctgctcataatgaggagtatattgccaagtacaatctggcgattagtcgaatgagagatcttgataagacacaacctttaaaccctattggtt

SEQ ID NO: 764 - DNA, 514 bp, Artificial
  Mutation introduced by TALE nuclease pair POT32_T03 within a POT32 allele
  misc_feature (151); (154): n is a or c or t or g
gcaagcttgtgcaatagttgtagtacatccctcaaaactccttttacttcttcctccacttctttaacttccactcctaaaccctctcaacttttcatccatggaaaacgtaaccaaatgttcaaagtttcatgcagttgctatcaataanagngcgaaccaaaacaagttgaaacgaattctgttgatcgaagaaatgttcttcttggcttaggtggtctttatggtgttgctaatgctataccattagctgcatccgctactccatctccacctcctgatctctcgtcttgtagtatagccaggattaacgaaactcatgtggtgccgtacagttgttgcgcgcctaagcctgatgatatggagaaagttccgtattacaagttcccttctatgactaagctccgtgttcgtcagcctgctcgtagatagaggagtatattgccaagtacaatttggcggttagcaagatgaggggatcttgataagacacaacctttaaaccctattggtt

SEQ ID NO: 765 - DNA, 513 bp, Artificial
  Mutation introduced by TALE nuclease pair POT32_T03 within a POT32 allele
gcaagcttgtgcaatagtagtagtacatctctcaaaactccttttacttcttcctccacttctttatcttccactcctaagccctctcaacttttcatccatggaaaacgtaaccaaatgttcaaagtttcatgcaaggttaccaataataacggtgaccaaaaccaaaacgttgaaacaaattctgttgatcgaagaaatgttcttcttggcttaggtggtctttatggtgttgctaatgctataccattagctgcatccgctgctccagctccacctcctgatctctcgtcttgtagtatagccaggattaacgaaaatcaggtggtgccgtacagttgttgcgcgcctaagcctgatgatatggagaaagttccgtattacaagttcccttctatgactaagctccgtgttcgtcagcctgctctaatgaggagtatattgccaagtacaatctggcgattagtcgaatgaaagatcttgataagacacaacctttaaaccctattggtt

SEQ ID NO: 766 - DNA, 509 bp, Artificial
  Mutation introduced by TALE nuclease pair POT32_T03 within a POT32 allele
gcaagcttgtgcaatagtagtagtacatctctcaaaactccttttacttcttcctccacttctttatcttccactcctaagcccctctcaacttttcatccatggaaaacgtaaccaaatgttcaaagtttcatgcaaggttatcaataataacggtgaccaaaacgttgaaacgaattctgttgatcgaagaaatgttcttcttggcttaggtggtctttatggtgttgctaatgctataccattagctgcatccgctgctccaactccacctcctgatctctcgtcttgtagtatagccaggattaacgaaaatcaggtggtgccgtacagttgttgcgcgcctaagcctgatgatatggagaaagttccgtattacaagttcccttctatgactaagctccgtgttcgtcagcctgctcctaatgaggagtatattgccaagtacaatctggcgattagtcgaatgagagatcttgataagacacaacctttaaaccctattggtt

SEQ ID NO: 767 - DNA, 516 bp, Artificial
  Mutation introduced by TALE nuclease pair POT32_T03 within a POT32 allele
  misc_feature (428): n is a or c or t or g
gcaagcttgtgcaatagtagtagtacatctctcaaaactccttttacttcttcctccacttctttacttccactcctaagccctctcaacttttcatccatggaaaacgtaaccaaatgttcaaagtttcatgcaaggttaccaataataacggtgaccaaaaccaaaacgttgaaacaattctgttgatcgaagaaatgttcttcttggcttaggtggtctttatggtgttgctaatgctataccattagctgcatccgctgctccagctccacctcctgatctctcgtcttgtagtatagccaggattaacgaaaatcaggtggtgccgtacagttgttgcgcgcctaagcctgatgatatggagaaagttccgtattacaagttcccttctatgactaagctccgtgttcgtcagcctgctcagngataatgaggagtatattgccaagtacaatctggcgattagtcgaatgaaagatcttgataagacacaacctttaaaccctattggtt

SEQ ID NO: 768 - DNA, 507 bp, Artificial
  Mutation introduced by TALE nuclease pair POT32_T03 within a POT32 allele
gcaagcttgtgcaatagttgtagtacatccctcaaacatccttttacttcttcctccacttctttaacttccactcctaaaccctctcaacttttcatccatggaaaacgtaaccaaatgttcaaagtttcatgcatggttaccaataataacggtgaccaaaaccaaaacgttgaaacgaattctgttgatcgaagaaatgttcttcttggcttaggtggtctttatggtgttgctaatgctataccattagctgcatccgctactccatctccacctcctgatctctcgtcttgtagtatagccaggattaacgaaactcatgtggtgccgtacagttgttgcgtgcctaagcctgatgatatggagaaagttccgtattacaagttcccttctatgactaagctccgtgttcgtcagcctgctcaaatgaggagtatattgccaagtacaatttggcggttagcaagatgagggatcttgataagacacaacctttaaacccta

SEQ ID NO: 769 - DNA, 508 bp, Artificial
  Mutation introduced by TALE nuclease pair POT32_T03 within a POT32 allele
gcaagcttgtgcaatagtagtagtacatctctcaaaactccttttacttcttcctccacttctttatcttccactcctaagcccctctcaacttttcatccatggaaaacgtaaccaaatgttcaaagtttcatgcaaggttatcaataataacggtgaccaaaacgttgaaacgaattctgttgatcgaagaaatgttcttcttggcttaggtggtctttatggtgttgctaatgctataccattagctgcatccgctgctccaactccacctcctgatctctcgtcttgtagtatagccaggattaacgaaaatcaggtggtgccgtacagttgttgcgcgcctaagcctgatgatatggagaaagttccgtattacaagttcccttctatgactaagctccgtgttcgtcagcctgctgaaatgaggagtatattgccaagtacaatctggcgattagtcgaatgagagatcttgataagacacaacctttaaaccctattggtt

SEQ ID NO: 770 - DNA, 511 bp, Artificial
  Mutation introduced by TALE nuclease pair POT32_T03 within a POT32 allele
gcaagcttgtgcaatagttgtagtacatctctcaaaactccttttacttcttcctccacttctttatcttccactcctaagccctctcaacttttcatccatggaaaacgtaaccaaatgttcaaagtttcatgcaaggttatcaataataacggtgaccaaaacgttgaaacgaattctgttgatcgaagaaatgttcttcttggcttaggtggtctttatggtgttgctaatgctataccattagctgcatccgctgctccaactccacctcctgatctctcgtcttgtagtatagccaggattaacgaaaatcaggtggtgccgtacagttgttgcgcgcctaagcctgatgatatggagaaagttccgtattacaagttcccttctatgactaagctccgtgttcgtcagcctgctcatgctaatgaggagtatattgccaagtacaatctggcgattagtcgaatgagagatcttgataagacacaacctttaaaccctattggtt

SEQ ID NO: 771 - DNA, 514 bp, Artificial
  Mutation introduced by TALE nuclease pair POT32_T03 within a POT32 allele
  misc_feature (153); (156); (263): n is a or c or t or g
gcaagcttgtgcaatagtagtagtacatctctcaaaactccttttacttcttcctccacttctttaacttccactcctaaaccgcctctcaacttttcatccatggaaaacgtaaccaaatgttcaaagtttcatgcagttgctatcaataanagngcgaaccaaaacagttgaaacgaattctgttgatcgaagaaatgttcttcttggcttaggtggtctttatggtgttgctaatgctataccattagctgcatccgctnctccagtccacctcctgatctctcgtcttgtagtatagccaggattaacgaaaactcagtggtgccgtacagttgttgcgcgcctaagcctgatgatatggagaaagttccgtattacaagttcccttctatgactaagctccgtgttcgtcagcctgctctgataatgaggagtatattgccaagtacaatttggcggttagcaagatgaggggatcttgataagacacaacctttaaaccctattggtt

SEQ ID NO: 772 - DNA, 509 bp, Artificial
  Mutation introduced by TALE nuclease pair POT32_T03 within a POT32 allele
gcaagcttgtgcaatagtagtagtacatccctcaaacatccttttacttcttcctccacttctttatcttccactcctaagcccctctcaacttttcatccatggaaaacgtaaccaaatgttcaaagtttcatgcaaggttatcaataataacggtgaccaaaacgttgaaacgaattctgttgatcgaagaaatgttcttcttggcttaggtggtctttatggtgttgctaatgctataccattagctgcatccgctgctccaactccacctcctgatctctcgtcttgtagtatagccaggattaacgaaaatcaggtggtgccgtacagttgttgcgcgcctaagcctgatgatatggagaaagttccgtattacaagttcccttctatgactaagctccgtgttcgtcagcctgctcataatgaggagtatattgccaagtacaatttggcggttagcaagatgagggatcttgataagacacaacctttaaaccctattggtt

SEQ ID NO: 773 - DNA, 488 bp, Artificial
  Mutation introduced by TALE nuclease pair POT32_T03 within a POT32 allele
gcaagcttgtgcaatagtagtagtacatctctcaaaactccttttacttcttcctccacttctttatcttccactcctaagcccctctcaacttttcatccatggaaaacgtaaccaaatgttcaaagtttcatgcaaggttatcaataataacggtgaccaaaacgttgaaacgaattctgttgatcgaagaaatgttcttcttggcttaggtggtctttatggtgttgctaatgctataccattagctgcatccgctgctccaactccacctcctgatctctcgtcttgtagtatagccaggattaacgaaaatcaggtggtgccgtacagttgttgcgcgcctaagcctgatgatatggagaaagttccgtattacaagttcccttctatgactaagctccgtgttcgtcagcctgcctaatgaggagtatattgccaagtacaatctggcgattagtcgaatgagagatcttgataagacacaa

SEQ ID NO: 774 - DNA, 511 bp, Artificial
  Mutation introduced by TALE nuclease pair POT32_T03 within a POT32 allele
  misc_feature (154): n is a or c or t or g
gcaagcttgtgcaatagtagtagtacatctctcaaaactccttttacttcttcctccacttctttatcttccactcctaagcccctctcaacttttcatccatggaaaacgtaaccaaatgttcaaagtttcatgcaaggttacataataacgngacaaaccaaaacgttgaaacgaattctgttgatcgaagaaatgttcttcttggcttaggtggtctttatggtgttgctaatgctataccattagctgcatccgctgctccagctccacctcctgatctctcgtcttgtagtatagccaggattaacgaaaatcaggtggtgccgtacagttgttgcgcgcctaagcctgatgatatggagaaagttccgtattacaagttcccttctatgactaagctccgtgttcgtcagcctgctcactaatgaggagtatattgccaagtacaatctggcgattagtcgaatgagagatcttgataagacacaacctttaaaccctattggtt

SEQ ID NO: 775 - DNA, 513 bp, Artificial
  Mutation introduced by TALE nuclease pair POT32_T03 within a POT32 allele
gcaagcttgtgcaatagttgtagtacatctctcaaaactccttttacttcttcctccacttctttaacttccactcctaaaccctctcaacttttcatccatggaaaacgtaaccaaatgttcaaagtttcatgcaaggttaccaataataacggtgaccaaaaccaaaacgttgaaacgaattctgttgatcgaagaaatgttcttcttggcttaggtggtctttatggtgttgctaatgctataccattagctgcatccgctactccatctccacctcctgatctctcgtcttgtagtatagccaggattaacgaaactcatgtggtgccgtacagttgttgcgcgcctaagcctgatgatatggagaaagttccgtattacaagttcccttctatgactaagctccgtgttcgtcagcctgctctaatgaggagtatattgccaagtacaatttggcggttagcaagatgagggatcttgataagacacaacctttaaaccctattggtt

SEQ ID NO: 776 - DNA, 495 bp, Artificial
  Mutation introduced by TALE nuclease pair POT32_T03 within a POT32 allele
gcaagcttgtgcaatagtagtagtacatctctcaaaactccttttacttcttcctccacttctttatcttccactcctaagcccctctcaacttttcatccatggaaaacgtaaccaaatgttcaaagtttcatgcaaggttatcaataataacggtgaccaaaacgttgaaacgaattctgttgatcgaagaaatgttcttcttggcttaggtggtctttatggtgttgctaatgctataccattagctgcatccgctgctccaactccacctcctgatctctcgtcttgtagtatagccaggattaacgaaaatcaggtggtgccgtacagttgttgcgcgcctaagcctgatgatatggagaaagttccgtattacaagttcccttctatgactaagctccgtgttcgtcagcctgctcaatgaggagtatattgccaagtacaatctggcgattagtcgaatgagagatcttgataagacacaaccctttt

SEQ ID NO: 777 - DNA, 514 bp, Artificial
  Mutation introduced by TALE nuclease pair POT32_T03 within a POT32 allele
  misc_feature (158): n is a or c or t or g
gcaagcttgtgcaatagtagtagtacatccctcaaacatccttttacttcttcctccacttctttaacttccactcctaaaccctctcaacttttcatccatggaaaacgtaaccaaatgttcaaagtttcatgcatggttaccaataataacggtgnccaaaaccaaaacgttgaaacgaattctgttgatcgaagaaatgttcttcttggcttaggtggtctttatggtgttgctaatgctataccattagctgcatccgctactccatctccacctcctgatctctcgtcttgtagtatagccaggattaacgaaactcatgtggtgccgtacagttgttgcgcgcctaagcctgatgatatggagaaagttccgtattacaagttcccttctatgactaagctccgtgttcgtcagcctgctgagatagaggagtatattgccaagtacaatttggcggttagcaagatgaggggatcttgataagacacaaccttttaaaccctattgg

SEQ ID NO: 778 - DNA, 482 bp, Artificial
  Mutation introduced by TALE nuclease pair POT32_T03 within a POT32 allele
gcaagcttgtgcaatagtagtagtacatctctcaaaactccttttacttcttcctccacttctttaacttccactcctaagccctctcaacttttcatccatggaaaacgtaaccaaatgttcaaagtttcatgcaaggttaccaataataacggtgaccaaaaccaaaacgttgaaacgaattctgttgatcgaagaaatgttcttcttggcttaggtggtctttatggtgttgctaatgctataccattagctgcatccgctactccatctccacctcctgatctctcatcttgtagtaaagcaaagattaatgaaactacggaggtgccatacagttgttgcgctcccacgccaaaagatatgaagaaagttccatattacaagttcccttctatgactaagctccgtattcggccaagtacaatctggcgattagtcgaatgaaagatcttgataagacacaacctttaaaccctatt

SEQ ID NO: 779 - DNA, 485 bp, Artificial
  Mutation introduced by TALE nuclease pair POT32_T03 within a POT32 allele
gcaagcttgtgcaatagtagtagtacatctctcaaaactccttttacttcttcctccacttctttatcttccactcctaagccctctcaacttttcatccatggaaaacgtaaccaaatgttcaaagtttcatgcaaggttaccaataataacggtgaccaaaaccaaaacgttgaaacgaattctgttgatcgaagaaatgttcttcttggcttaggtggtctttatggtgttgctaatgctataccattagctgcatccgctgctccagctccacctcctgatctctcgtcttgtagtatagccaggattaacgaaaatcaggtggtgccgtacagttgttgcgcgcctaagcctgatgatatggagaaagttccgtattacaagttcccttctatgactaagctccgtgttcgtcagcctgctcataatgaggagtatattgccaagtacaatttggcggttagcaagatgaggggatcttg

SEQ ID NO: 780 - DNA, 515 bp, Artificial
  Mutation introduced by TALE nuclease pair POT32_T03 within a POT32 allele
gcaagcttgtgcaatagttgtagtacatccctcaaacatccttttacttcttcctccacttctttaacttccactcctaaaccctctcaacttttcatccatggaaaacgtaaccaaatgttcaaagtttcatgcatggttaccaataataacggtgaccaaaaccaaaacgttgaaacgaattctgttgatcgaagaaatgttcttcttggcttaggtggtctttatggtgttgctaatgctataccattagctgcatccgctactccatctccacctcctgatctctcgtcttgtagtatagccaggattaacgaaactcatgtggtgccgtacagttgttgcgcgcctaagcctgatgatatggagaaagttccgtattacaagttcccttctatgactaagctccgtgttcgtcagcctgctcataatgaggagtatattgccaagtacaatttggcggttagcaagatgaggggatcttgataagacacaacctttaaaccctattggtt

SEQ ID NO: 781 - DNA, 515 bp, Artificial
  Mutation introduced by TALE nuclease pair POT32_T03 within a POT32 allele
gcagcttgtgcaatagtagtagtacatctctcaaaactccttttacttcttcctccacttctttatcttccactcctaagcccctctcaacttttcatccatggaaaacgtaaccaaatgttcaaagtttcatgcaaggttaccaataataacggtgaccaaaaccaaaacgttgaaacaaattctgttgatcgaagaaatgttcttcttggcttaggtggtctttatggtgttgctaatgctataccattagctgcatccgctgctccagctccacctcctgatctctcgtcttgtagtatagccaggattaacgaaaatcaggtggtgccgtacagttgttgcgcgcctaagcctgatgatatggagaaagttccgtattacaagttcccttctatgactaagctccgtgttcgtcagcctgctcatagatagaggagtatattgccaagtacaatctggcgattagtcgaatgaagatcttgataagacacaacctttaaaccctattggtt

SEQ ID NO: 782 - DNA, 491 bp, Artificial
  Mutation introduced by TALE nuclease pair POT32_T03 within a POT32 allele
  misc_feature (314): n is a or c or t or g
gcaagcttgtgcaatagttgtagtacatcctcaacaatccttttacttcttcctccacttctttaacttccactcctaaaccctctcaacttttcatccatggaaaacgtaaccaaatgttcaaagtttcatgcatggttaccaataataacggtgaccaaaaccaaaacgttgaaacgaattctgttgatcgaagaaatgttcttcttggcttaggtggtctttatggtgttgctaatgctataccattagctgcatccgctactccatctccacctcctgatctctcgtcttgtagtatagccaggattaangaaactcatgtggtgccgtacagttgttgcgcgcctaagcctgatgatatggagaaagttccgtattacaagttcccttctatgactaagctccgtgttcgtcagcctgctaatgaggagtatattgccaagtacaatttggcggttagcaagatgagggatcttgataagacacaa

SEQ ID NO: 783 - DNA, 510 bp, Artificial
  Mutation introduced by TALE nuclease pair POT32_T03 within a POT32 allele
  misc_feature (428): n is a or c or t or g
gcaagcttgtgcaatagtagtagtacatctctcaaaactccttttacttcttcctccacttctttatcttccactcctaagccctctcaacttttcatccatggaaaacgtaaccaaatgttcaaagtttcatgcaaggttaccaataataacggtgaccaaaaccaaaacgttgaaacaattctgttgatcgaagaaatgttcttcttggcttaggtggtctttatggtgttgctaatgctataccattagctgcatccgctgctccagctccacctcctgatctctcgtcttgtagtatagccaggattaacgaaaatcaggtggtgccgtacagttgttgcgcgcctaagcctgatgatatggagaaagttccgtattacaagttcccttctatgactaagctccgtgttcgtcagcctgctcangataatgaggagtatattgccaagtacaatctggcgattagtcgaatgaaagatcttgataagacacaacctttaaacccta

SEQ ID NO: 784 - DNA, 494 bp, Artificial
  Mutation introduced by TALE nuclease pair POT32_T03 within a POT32 allele
gcaagcttgtgcaatagtagtagtacatctctcaaaactccttttacttcttcctccacttctttatcttccactcctaagcccctctcaacttttcatccatggaaaacgtaaccaaatgttcaaagtttcatgcaaggttaccaataataacggtgaccaaaaccaaaacgttgaaacgaattctgttgatcgaagaaatgttcttcttggcttaggtggtctttatggtgttgctaatgctataccattagctgcatccgctactccatctccacctcctgatctctcgtcttgtagtatagccaggattaacgaaactcatgtggtgccgtacagttgttgcgcgcctaagcctgatgatatggagaaagttccgtattacaagttcccttctatgactaagctccgtgttcgtcagcctgctcatgaaggagtatattgccaagtacaatttggcggttagcaagatgagggatcttgataagacacaa

SEQ ID NO: 785 - DNA, 515 bp, Artificial
  Mutation introduced by TALE nuclease pair POT32_T03 within a POT32 allele
gcaagcttgtgcaatagtagtagtacatctctcaaaactccttttacttcttcctccacttctttaacttccactcctaagcccctctcaacttttcatccatggaaaacgtaaccaaatgttcaaagtttcatgcaaggttaccaataataacggtgaccaaaaccaaaacgttgaaacgaattctgttgatcgaagaaatgttcttcttggcttaggtggtctttatggtgttgctaatgctataccattagctgcatccgctgctccagctccacctcctgatctctcgtcttgtagtatagccaggattaacgaaaatcaggtggtgccgtacagttgttgcgcgcctaagcctgatgatatggagaaagttccgtattacaagttcccttctatgactaagctccgtgttcgtcagcctgcttgtaatgaggagtatattgccaagtacaatttggcggttagcaagatgagggatcttgataagacacaacctttaaaccctattggtt

SEQ ID NO: 786 - DNA, 508 bp, Artificial
  Mutation introduced by TALE nuclease pair POT32_T03 within a POT32 allele
  misc_feature (152): n is a or c or t or g
gcaagcttgtgcatagtagtagtacatctctcaaaactccttttacttcttcctccacttctttatcttccactcctaagccctctcaacttttcatccatggaaaacgtaaccaaatgttcaaagtttcatgcaaggttacataataacgngcaaaccaaaacagttgaaacaaattctgttgatcgaagaaatgttcttcttggcttaggtggtctttatggtgttgctaatgctataccattagctgcatccgctgctccaactccacctcctgatctctcgtcttgtagtatagccaggattaacgaaaatcaggtggtgccgtacagttgttgcgcgcctaagcctgatgatatggagaaagttccgtattacaagttcccttctatgactaagctccgtgttcgtcagcctgctcctaatgaggagtatattgccaagtacaatctggcgattagtcgaatgagagatcttgataagacacaacctttaaaccctattggtt

SEQ ID NO: 787 - DNA, 515 bp, Artificial
  Mutation introduced by TALE nuclease pair POT32_T03 within a POT32 allele
gcaagcttgtgcaatagtagtagtacatctctcaaaactccttttacttcttcctccacttctttaacttccactcctaagcccctctcaacttttcatccatggaaaacgtaaccaaatgttcaaagtttcatgcaaggttaccaataataacggtgaccaaaaccaaaacgttgaaacgaattctgttgatcgaagaaatgttcttcttggcttaggtggtctttatggtgttgctaatgctataccattagctgcatccgctgctccagctccacctcctgatctctcgtcttgtagtatagccaggattaacgaaaatcaggtggtgccgtacagttgttgcgcgcctaagcctgatgatatggagaaagttccgtattacaagttcccttctatgactaagctccgtgttcgtcagcctgctcataatgaggagtatattgccaagtacaatttggcggttagcaagatgagggatcttgataagacacaacctttaaaccctattggtt

SEQ ID NO: 788 - DNA, 516 bp, Artificial
  Mutation introduced by TALE nuclease pair POT32_T03 within a POT32 allele
gcaagcttgtgcaatagtagtagtacatctctcaaaactccttttacttcttcctccacttctttaacttccactcctaagcccctctcaacttttcatccatggaaaacgtaaccaaatgttcaaagtttcatgcaaggttaccaataataacggtgaccaaaaccaaaacgttgaaacgaattctgttgatcgaagaaatgttcttcttggcttaggtggtctttatggtgttgctaatgctataccattagctgcatccgctgctccagctccacctcctgatctctcgtcttgtagtatagccaggattaacgaaaatcaggtggtgccgtacagttgttgcgcgcctaagcctgatgatatggagaaagttccgtattacaagttcccttctatgactaagctccgtgttcgtcagcctgctcactaatgaggagtatattgccaagtacaatctggcgattagtcgaatgaaagatcttgataagacacaacctttaaaccctattggtt

SEQ ID NO: 789 - DNA, 501 bp, Artificial
  Mutation introduced by TALE nuclease pair POT32_T03 within a POT32 allele
  misc_feature (146); (155); (268): n is a or c or t or g
gcaagcttgtgcaatagtagtagtacatctctcaaaactccttttacttcttcctccacttctttatcttccactcctaagcccctctcaacttttcatccatggaaaacgtaaccaaatgttcaaagtttcatgcaaggttacanaataatagngcgaaccaaaacgttgaaacgaattctgttgatcgaagaaatgttcttcttggcttaggtggtctttatggtgttgctaatgctataccattagctgcatccgctgctccaantccacctcctgatctctcgtcttgtagtatagccaggattaacgaaaatcaggtggtgccgtacagttgttgcgcgcctaagcctgatgatatggagaaagttccgtattacaagttcccttctatgactaagctccgtgttcgtcagcctgctcatgaggagtatattgccaagtacaatctggcgattagtcgaatgaaagatcttgataagacacaacctttaaacccta

SEQ ID NO: 790 - DNA, 507 bp, Artificial
  Mutation introduced by TALE nuclease pair POT32_T03 within a POT32 allele
gcaagcttgtgcaatagtagtagtacatctctcaaaactccttttacttcttcctccacttctttatcttccactcctaagcccctctcaacttttcatccatggaaaacgtaaccaaatgttcaaagtttcatgcaaggttaccaataataacggtgaccaaaaccaaaacgttgaaacaaattctgttgatcgaagaaatgttcttcttggcttaggtggtctttatggtgttgctaatgctataccattagctgcatccgctgctccagctccacctcctgatctctcgtcttgtagtatagccaggattaacgaaaatcaggtggtgccgtacagttgttgcgcgcctaagcctgatgatatggagaaagttccgtattacaagttcccttctatgactaagctccgtgttcgtcagcctgctcaatgaggagtatattgccaagtacaatctggcgattagtcgaatgaaagatcttgataagacacaacctttaaacccta

SEQ ID NO: 791 - DNA, 504 bp, Artificial
  Mutation introduced by TALE nuclease pair POT32_T03 within a POT32 allele
gcaagcttgtgcaatagtagtagtacatctctcaaaactccttttacttcttcctccacttctttaacttccactcctaagcccctctcaacttttcatccatggaaaacgtaaccaaatgttcaaagtttcatgcaaggttaccaataataacggtgaccaaaaccaaaacgttgaaacgaattctgttgatcgaagaaatgttcttcttggcttaggtggtctttatggtgttgctaatgctataccattagctgcatccgctgctccagctccacctcctgatctctcgtcttgtagtatagccaggattaacgaaaatcaggtggtgccgtacagttgttgcgcgcctaagcctgatgatatggagaaagttccgtattacaagttcccttctatgactaagctccgtgttcgtcagcctgctcaaggagtatattgccaagtacaatctggcgattagtcgaatgaaagatcttgataagacacaacctttaaacccta

SEQ ID NO: 792 - DNA, 516 bp, Artificial
  Mutation introduced by TALE nuclease pair POT32_T03 within a POT32 allele
gcaagcttgtgcaatagttgtagtacatccctcaaaactccttttacttcttcctccacttctttaacttccactcctaaaccctctcaacttttcatccatggaaaacgtaaccaaatgttcaaagtttcatgcatggttaccaataataacggtgaccaaaaccaaaacgttgaaacgaattctgttgatcgaagaaatgttcttcttggcttaggtggtctttatggtgttgctaatgctataccattagctgcatccgctactccatctccacctcctgatctctcgtcttgtagtatagccaggattaacgaaactcatgtggtgccgtacagttgttgcgcgcctaagcctgatgatatggagaaagttccgtattacaagttcccttctatgactaagctccgtgttcgtcagcctgctcatctaatgaggagtatattgccaagtacaatctggcgattagtcgaatgaaagatcttgataagacacaacctttaaaccctattggtt

SEQ ID NO: 793 - DNA, 506 bp, Artificial
  Mutation introduced by TALE nuclease pair POT32_T03 within a POT32 allele
gcaagcttgtgcaatagtagtagtacatctctcaaaactccttttacttcttcctccacttctttatcttccactcctaagcccctctcaacttttcatccatggaaaacgtaaccaaatgttcaaagtttcatgcaaggttaccaataataacggtgaccaaaaccaaaacgttgaaacaaattctgttgatcgaagaaatgttcttcttggcttaggtggtctttatggtgttgctaatgctataccattagctgcatccgctgctccagctccacctcctgatctctcgtcttgtagtatagccaggattaacgaaaatcaggtggtgccgtacagttgttgcgcgcctaagcctgatgatatggagaaagttccgtattacaagttcccttctatgactaagctccgtgttcgtcagcctgctaatgaggagtatattgccaagtacaatctggcgattagtcgaatgaaagatcttgataagacacaacctttaaacccta

SEQ ID NO: 794 - DNA, 487 bp, Artificial
  Mutation introduced by TALE nuclease pair POT32_T03 within a POT32 allele
  misc_feature (160): n is a or c or t or g
gcaagcttgtgcaatagttgtagtacatccctcaaaacatccttttacttcttcctccacttctttaacttccactcctaaacccctctcaacttttcatccatggaaaacgtaaccaaatgttcaaagtttcatgcatggttaccaataataacggtgnccaaaccaaaacgttgaaacgaattctgttgatcgaagaaatgttcttcttggcttaggtggtctttatggtgttgctaatgctataccattagctgcatccgctactccatctccacctcctgatctctcgtcttgtagtatagccaggattaacgaaactcatgtggtgccgtacagttgttgcgcgcctaagcctgatgatatggagaaagttccgtattacaagttcccttctatgactaagctccgtgttcgtcagcctgctaatgaggagtatattgccaagtacaatttggcggttagcaagatgagggatcttgataag

SEQ ID NO: 795 - DNA, 513 bp, Artificial
  Mutation introduced by TALE nuclease pair POT32_T03 within a POT32 allele
gcaagcttgtgcaatagtagtagtacatctctcaaaactccttttacttcttcctccacttctttatcttccactcctaagcccctctcaacttttcatccatggaaaacgtaaccaaatgttcaaagtttcatgcaaggttatcaataataacggtgaccaaaacgttgaaacgaattctgttgatcgaagaaatgttcttcttggcttaggtggtctttatggtgttgctaatgctataccattagctgcatccgctgctccaactccacctcctgatctctcgtcttgtagtatagccaggattaacgaaaatcaggtggtgccgtacagttgttgcgcgcctaagcctgatgatatggagaaagttccgtattacaagttcccttctatgactaagctccgtgttcgtcagcctgctcagtgataatgaggagtatattgccaagtacaatctggcgattagtcgaatgagagatcttgataagacacaacctttaaaccctattggtt

SEQ ID NO: 796 - DNA, 500 bp, Artificial
  Mutation introduced by TALE nuclease pair POT32_T03 within a POT32 allele
gcaagcttgtgcaatagtagtagtaccactctcaaaactccttttacttcttcctccacttctttatcttccactcctaagccctctcaacttttcctccatggaaaacgtaacaaaacgttcaaagtttcatgcaaggttaccaataataacggtgaccaaaaccaaaacgttgaaacgaattctgttgatcgaagaaatgttcttcttggcttaggtggtctttatggtgttgctaatgctataccattagctgcatccgctactccatctccacctcctgatctctcatcttgtagtaaagcaaagattaatgaaactacggaggtgccatacagttgttgcgctcccacgcctaaagatatgaagaaagttccatattacaagttcccttctatgactaagctccgtattcgtcccctgcgaggagtatattgccaagtacaatttggcggttagcaagatgagggatcttgataagacacaacctttaaacccta

SEQ ID NO: 797 - DNA, 516 bp, Artificial
  Mutation introduced by TALE nuclease pair POT32_T03 within a POT32 allele
  misc_feature (153); (156): n is a or c or t or g
gcaagcttgtgcaatagtagtagtacatctctcaaaactccttttacttcttcctccacttctttaacttccactcctaaaccgcctctcaacttttcatccatggaaaacgtaaccaaatgttcaaagtttcatgcagttgctatcaataanagngcgaaccaaaacaagttgaaacgaattctgttgatcgaagaaatgttcttcttggcttaggtggtctttatggtgttgctaatgctataccattagctgcatccgctactccagtccacctcctgatctctcgtcttgtagtatagccaggattaacgaaaactcaggtggtgccgtacagttgttgcgcgcctaagcctgatgatatggagaaagttccgtattacaagttcccttctatgactaagctccgtgttcgtcagcctgctctgataatgaggagtatattgccaagtacaatttggcggttagcaagatgaggggatcttgataagacacaacctttaaaccctattggtt

SEQ ID NO: 798 - DNA, 499 bp, Artificial
  Mutation introduced by TALE nuclease pair POT32_T03 within a POT32 allele
gcaagcttgtgcaatagtagtagtacatctctcaaaactccttttacttcttcctccacttctttatcttccactcctaagcccctctcaacttttcatccatggaaaacgtaaccaaatgttcaaagtttcatgcaaggttatcaataataacggtgaccaaaacgttgaaacgaattctgttgatcgaagaaatgttcttcttggcttaggtggtctttatggtgttgctaatgctataccattagctgcatccgctgctccaactccacctcctgatctctcgtcttgtagtatagccaggattaacgaaaatcaggtggtgccgtacagttgttgcgcgcctaagcctgatgatatggagaaagttccgtattacaagttcccttctatgactaagctccgtgttcgtcagcctgcaatgaggagtatattgccaagtacaatctggcgattagtcgaatgagagatcttgataagacacaacctttaaacccta

SEQ ID NO: 799 - DNA, 500 bp, Artificial
  Mutation introduced by TALE nuclease pair POT32_T03 within a POT32 allele
gcaagcttgtgcaatagtagtagtaccactctcaaaactccttttacttcttcctccacttctttatcttccactcctaagcccctctcaacttttcctccatggaaaacgtaacaaaacgttcaaagtttcatgcaaggttaccaataataacggtgaccaaaaccaaaacgttgaaacgaattctgttgatcgaagaaatgttcttcttggcttaggtggtctttatggtgttgctaatgctataccattagctgcatccgctactccatctccacctcctgatctctcatcttgtagtaaagcaaagattatgaaactacggaggtgccatacagttgttgcgctcccacgcctaaagatatgaagaaagttccatattacaagttcccttctatgactaagctccgtattcgtcccctgcgaggagtatattgccaagtacaatttggcggttagcaagatgagggatcttgataagacacaacctttaaacccta

SEQ ID NO: 800 - DNA, 463 bp, Artificial
  Mutation introduced by TALE nuclease pair POT32_T03 within a POT32 allele
gcagcttgtgcaatagtagtagtacatctctcaaaactccttttacttcttcctccacttctttatcttccactcctaagcccctctcaacttttcatccatggaaaacgtaaccaaatgttcaaagtttcatgcaaggttaccaataataacggtgaccaaaaccaaaacgttgaaacaaattctgttgatcgaagaaatgttcttcttggcttaggtggtctttatggtgttgctaatgctataccattagctgcatccgctgctccagctccacctcctgatctctcgtcttgtagtatagccaggattaacgaaaatcaggtggtgccgtacagttgttgcgcgcctaagcctgatgatatggagaaagttccgtattacaagttcccttctatgactaagctccgtgttcgtcagcctgctcatgataatgaggagtatattgccaagtacaattgcg

SEQ ID NO: 801 - DNA, 484 bp, Artificial
  Mutation introduced by TALE nuclease pair POT32_T03 within a POT32 allele
gcaagcttgtgcaatagtagtagtacatctctcaaaaactccttttacttcttcctccacttctttatcttccactcctaagcccctctcaacttttcatccatggaaaacgttaaccaaatgttcaaagtttcatgcaaggttattcaataataacggtgaccaaaacgttgaaacgaattctgttgatcgaagaaatgttcttcttggcttaggtggtctttatggtgttgctaatgctataccattagctgcatccgctgctccaactccacctcctgatctctcgtcttgtagtatagccaggatttaacgaaaatcaggtggtgccgtacagttgttgcgcgcctaagcctgatgatatggagaaagttccgtattacaagttcccttctatgactaagctccgtgttcgtcagcctgctcagctaatgaggagtatattgccaagtacaatctggcgattagtcgaatgagagatctt

SEQ ID NO: 802 - DNA, 517 bp, Artificial
  Mutation introduced by TALE nuclease pair POT32_T03 within a POT32 allele
gcaagcttgtgcaatagtagtagtacatctctcaaaactccttttacttcttcctccacttctttaacttccactcctaagcccctctcaacttttcatccatggaaaacgtaaccaaatgttcaaagtttcatgcaaggttaccaataataacggtgaccaaaaccaaaacgttgaaacgaattctgttgatcgaagaaatgttcttcttggcttaggtggtctttatggtgttgctaatgctataccattagctgcatccgctactccatctccacctcctgatctctcgtcttgtagtatagccaggattaacgaaactcatgtggtgccgtacagttgttgcgcgcctaagcctgatgatatggagaaagttccgtattacaagttcccttctatgactaagctccgtgttcgtcagcctgctcatgtaatgaggagtatattgccaagtacaatttggcggttagcaagatgagggatcttgataagacacaacctttaaaccctattggtt

SEQ ID NO: 803 - DNA, 488 bp, Artificial
  Mutation introduced by TALE nuclease pair POT32_T03 within a POT32 allele
gcaagcttgtgcaatagtagtagtacatctctcaaaactccttttacttcttcctccacttctttaacttccactcctaagcccctctcaacttttcatccatggaaaacgtaaccaaatgttcaaagtttcatgcaaggttaccaataataacggtgaccaaaaccaaaacgttgaaacgaattctgttgatcgaagaaatgttcttcttggcttaggtggtctttatggtgttgctaatgctataccattagctgcatccgctgctccagctccacctcctgatctctcgtcttgtagtatagccaggattaacgaaaatcaggtggtgccgtacagttgttgcgcgcctaagcctgatgatatggagaaagttccgtattacaagttcccttctatgactaagctccgtgttcgtcagcctgctcatatattgccaagtacaatttggcggttagcaagatgagggatcttgataagacacaacc

SEQ ID NO: 804 - DNA, 517 bp, Artificial
  Mutation introduced by TALE nuclease pair POT32_T03 within a POT32 allele
gcaagcttgtgcaatagtagtagtacatctctcaaaactccttttacttcttcctccacttctttaacttccactcctaagcccctctcaacttttcatccatggaaaacgtaaccaaatgttcaaagtttcatgcaaggttaccaataataacggtgaccaaaaccaaaacgttgaaacaattctgttgatcgaagaaatgttcttcttggcttaggtggtctttatggtgttgctaatgctataccattagctgcatccgctgctccagctccacctcctgatctctcgtcttgtagtatagccaggattaacgaaaatcaggtggtgccgtacagttgttgcgcgcctaagcctgatgatatggagaaagttccgtattacaagttcccttctatgactaagctccgtgttcgtcagcctgctcatgataatgaggagtatattgccaagtacaatctggcgattagtcgaatgaaagatcttgataagacacaacctttaaaccctattggtt

SEQ ID NO: 805 - DNA, 515 bp, Artificial
  Mutation introduced by TALE nuclease pair POT32_T03 within a POT32 allele
gcaagcttgtgcaatagtagtagtacatctctcaaaactccttttacttcttcctccacttctttatcttccactcctaagcccctctcaacttttcatccatggaaaacgtaaccaaatgttcaaagtttcatgcaaggttaccaataataacggtgaccaaaaccaaaacgttgaaacgaattctgttgatcgaagaaatgttcttcttggcttaggtggtctttatggtgttgctaatgctataccattagctgcatccgctgctccagctccacctcctgatctctcgtcttgtagtatagccaggattaacgaaaatcaggtggtgccgtacagttgttgcgcgcctaagcctgatgatatggagaaagttccgtattacaagttcccttctatgactaagctccgtgttcgtcagcctgctcataatgaggagtatattgccaagtacaatttggcggttagcaagatgagggatcttgataagacacaacctttaaaccctattggtt

SEQ ID NO: 806 - DNA, 506 bp, Artificial
  Mutation introduced by TALE nuclease pair POT32_T03 within a POT32 allele
gcaagcttgtgcaatagtattagtacatctctcaaaactccttttacttcttcctccacttctttatcttccactcctaagccctctcaacttttcatccatggaaaacgtaaccaaatgttcaaagtttcatgcaaggttaccaataataacggtgaccaaaaccaaaacgttgaaacgaattctgttgatcgaagaaatgttcttcttggcttaggtggtctttatggtgttgctaatgctataccattagctgcatccgctgctccagctccacctcctgatctctcgtcttgtagtatagccaggattaacgaaaatcaggtggtgccgtacagttgttgcgcgcctaagcctgatgatatggagaaagttccgtattacaagttcccttctatgactaagctccgtgttcgtcagcctgcttaatgaggagtatattgccaagtacaatttggcggttagcaagatgagggatcttgataagacacaacctttaaacccta

SEQ ID NO: 807 - DNA, 487 bp, Artificial
  Mutation introduced by TALE nuclease pair POT32_T03 within a POT32 allele
gcaagcttgtgcaatagtagtagtacatctctcaaaactccttttacttcttcctccacttctttaacttccactcctaagccctctcaacttttcatccatggaaaacgtaaccaaatgttcaaagtttcatgcaaggttaccaataataacggtgaccaaaaccaaaacgttgaaacgaattctgttgatcgaagaaatgttcttcttggcttaggtggtctttatggtgttgctaatgctataccattagctgcatccgctactccatctccacctcctgatctctcgtcttgtagtatagccaggattaacgaaactcatgtggtgccgtacagttgttgcgcgcctaagcctgatgatatggagaaagttccgtattacaagttcccttctatgactaagctccgtgttcgtcgctaatgaggagtatattgccaagtacaatttggcggttagcaagatgagggatcttgataagacacaa

SEQ ID NO: 808 - DNA, 514 bp, Artificial
  Mutation introduced by TALE nuclease pair POT32_T03 within a POT32 allele
gcaagcttgtgcaatagttgtagtacatctctcaaaactccttttacttcttcctccacttctttaacttccactcctaagccctctcaacttttcatccatggaaaacgtaaccaaatgttcaaagtttcatgcaaggttaccaataataacggtgaccaaaaccaaaacgttgaaacgaattctgttgatcgaagaaatgttcttcttggcttaggtggtctttatggtgttgctaatgctataccattagctgcatccgctgctccagctccacctcctgatctctcgtcttgtagtatagccaggattaacgaaactcatgtggtgccgtacagttgttgcgcgcctaagcctgatgatatggagaaagttccgtattacaagttcccttctatgactaagctccgtgttcgtcagcctgctcataatgaggagtatattgccaagtacaatttggcggttagcaagatgagggatcttgataagacacaacctttaaaccctattggtt

SEQ ID NO: 809 - DNA, 507 bp, Artificial
  Mutation introduced by TALE nuclease pair POT32_T03 within a POT32 allele
gcaagcttgtgcaatagtagtagtacatctctcaaaactccttttacttcttcctccacttctttatcttccactcctaagccctctcaacttttcatccatggaaaacgtaaccaaatgttcaaagtttcatgcaaggttaccaataataacggtgaccaaaaccaaaacgttgaaacaaattctgttgatcgaagaaatgttcttcttggcttaggtggtctttatggtgttgctaatgctataccattagctgcatccgctgctccagctccacctcctgatctctcgtcttgtagtatagccaggattaacgaaaatcaggtggtgccgtacagttgttgcgcgcctaagcctgatgatatggagaaagttccgtattacaagttcccttctatgactaagctccgtgttcgtcagcctgctcaaatgaggagtatattgccaagtacaatctggcgattagtcgaatgaaagatcttgataagacacaacctttaaacccta

SEQ ID NO: 810 - DNA, 510 bp, Artificial
  Mutation introduced by TALE nuclease pair POT32_T03 within a POT32 allele
gcaagcttgtgcaatagtagtagtacatctctcaaaactccttttacttcttcctccacttctttatcttccactcctaagcccctctcaacttttcatccatggaaaacgtaaccaaatgttcaaagtttcatgcaaggttatcaataataacggtgaccaaaacgttgaaacgaattctgttgatcgaagaaatgttcttcttggcttaggtggtctttatggtgttgctaatgctataccattagctgcatccgctgctccaactccacctcctgatctctcgtcttgtagtatagccaggattaacgaaaatcaggtggtgccgtacagttgttgcgcgcctaagcctgatgatatggagaaagttccgtattacaagttcccttctatgactaagctccgtgttcgtcagcctgctcagctaatgaggagtatattgccaagtacaatctggcgattagtcgaatgagagatcttgataagacacaacctttaaaccctatggtt

SEQ ID NO: 811 - DNA, 515 bp, Artificial
  Mutation introduced by TALE nuclease pair POT32_T03 within a POT32 allele
gcaagcttgtgcaatagtagtagtacatctctcaaaactccttttacttcttcctccacttctttaacttccactcctaagcccctctcaacttttcatccatggaaaacgtaaccaaatgttcaaagtttcatgcaaggttaccaataataacggtgaccaaaaccaaaacgttgaaacgaattctgttgatcgaagaaatgttcttcttggcttaggtggtctttatggtgttgctaatgctataccattagctgcatccgctgctccagctccacctcctgatctctcgtcttgtagtatagccaggattaacgaaaatcaggtggtgccgtacagttgttgcgcgcctaagcctgatgatatggagaaagttccgtattacaagttcccttctatgactaagctccgtgttcgtcagcctgctcataatgaggagtatattgccaagtacaatctggcgattagtcgaatgaaagatcttgataagacacaacctttaaaccctattggtt

SEQ ID NO: 812 - DNA, 508 bp, Artificial
  Mutation introduced by TALE nuclease pair POT32_T03 within a POT32 allele
gcaagcttgtgcaatagtagtagtacatctctcaaaactccttttacttcttcctccacttctttatcttccactcctaagcccctctcaacttttcatccatggaaaacgtaaccaaatgttcaaagtttcatgcaaggttatcaataataacggtgaccaaaacgttgaaacgaattctgttgatcgaagaaatgttcttcttggcttaggtggtctttatggtgttgctaatgctataccattagctgcatccgctgctccaactccacctcctgatctctcgtcttgtagtatagccaggattaacgaaaatcaggtggtgccgtacagttgttgcgcgcctaagcctgatgatatggagaaagttacgtattacaagttcccttctatgactaagctccgtgttcgtcagcctgctctaatgaggagtatattgccaagtacaatctggcgattagtcgaatgagagatcttgataagacacaacctttaaaccctattggtt

SEQ ID NO: 813 - DNA, 514 bp, Artificial
  Mutation introduced by TALE nuclease pair POT32_T03 within a POT32 allele
gcaagcttgtgcaatagtagtagtacatctctcaaaactccttttacttcttcctccacttctttaacttccactcctaaaccctctcaacttttcatccatggaaaacgtaaccaaatgttcaaagtttcatgcaaggttaccaataataacggtgaccaaaaccaaaacgttgaaacgaattctgttgatcgaagaaatgttcttcttggcttaggtggtctttatggtgttgctaatgctataccattagctgcatccgctactccatctccacctcctgatctctcgtcttgtagtatagccaggattaacgaaactcatgtggtgccgtacagttgttgcgcgcctaagcctgatgatatggagaaagttccgtattacaagttcccttctatgactaagctccgtgttcgtcagcctgctcataatgaggagtatattgccaagtacaatttggcggttagcaagatgagggatcttgataagacacaacctttaaaccctattggtt

SEQ ID NO: 814 - DNA, 496 bp, Artificial
  Mutation introduced by TALE nuclease pair POT32_T03 within a POT32 allele
gcaagcttgtgcaatagtagtagtacatctctcaaaactccttttacttcttcctccacttctttatcttccactcctaagcccctctcaacttttcatccatggaaaacgtaaccaaatgttcaaagtttcatgcaaggttatcaataataacggtgaccaaaacgttgaaacgaattctgttgatcgaagaaatgttcttcttggcttaggtggtctttatggtgttgctaatgctataccattagctgcatccgctgctccaactccacctcctgatctctcgtcttgtagtatagccaggattaacgaaaatcaggtggtgccgtacagttgttgcgcgcctaagcctgatgatatggagaaagttccgtattacaagttcccttctatgactaagctccgtgttcgtcagcctgcaatgaggagtatattgccaagtacaatctggcgttagtcgaatgagagatcttgataagacacaacctttaaaccc

SEQ ID NO: 815 - DNA, 492 bp, Artificial
  Mutation introduced by TALE nuclease pair POT32_T03 within a POT32 allele
gaagcttgtgcaatagtagtagtacatctctcaaaactccttttacttcttcctccacttctttatcttccactcctaagcccctctcaacttttcatccatggaaaacgtaaccaaatgttcaaagtttcatgcaaggttaccaataataacggtgaccaaaaccaaaacgttgaaacaaattctgttgatcgaagaaatgttcttcttggcttaggtggtctttatggtgttgctaatgctataccattagctgcatccgctgctccagctccacctcctgatctctcgtcttgtagtatagccaggattaacgaaaatcaggtggtgccgtacagttgttgcgcgcctaagcctgatgatatggagaaagttccgtattacaagttcccttctatgactaagctccgtgttcgaggagtatattgccaagtacaatttggcggttagcaagatgaggggatcttgataagacacaacctttaaacccta

SEQ ID NO: 816 - DNA, 514 bp, Artificial
  Mutation introduced by TALE nuclease pair POT32_T03 within a POT32 allele
gcaagcttgtgcaatagtagtagtacatctctcaaaactccttttacttcttcctccacttctttatcttccactcctaagccctctcaacttttcatccatggaaaacgtaaccaaatgttcaaagtttcatgcaaggttaccaataataacggtgaccaaaaccaaaacgttgaaacgaattctgttgatcgaagaaatgttcttcttggcttaggtggtctttatggtgttgctaatgctataccattagctgcatccgctgctccagctccacctcctgatctctcgtcttgtagtatagccaggattaacgaaaatcaggtggtgccgtacagtgttgcgcgcctaagcctgatgatatggagaaagttccgtattacaagttcccttctatgactaagctccgtgttcgtcagcctgctcatgaagaggagtatattgccaagtacaatttggcggttagcaagatgaggggatcttgataagacacaacctttaaaccctattggtt

SEQ ID NO: 817 - DNA, 500 bp, Artificial
  Mutation introduced by TALE nuclease pair POT32_T03 within a POT32 allele
gcaagcttgtgcaatagttgtagtacatccctcaaaactccttttacttcttcctccacttctttaacttccactcctaaaccctctcaacttttcatccatggaaaacgtaaccaaatgttcaaagtttcatgcaaggttaccaataataacggtgaccaaaaccaaaacgttgaaacgaattctgttgatcgaagaaatgttcttcttggcttaggtggtctttatggtgttgctaatgctataccattagctgcatccgctactccatctccacctcctgatctctcgtcttgtagtatagccaggattaacgaaactcatgtggtgccgtacagttgttgcgcgcctaagcctgatgatatggagaaagttccgtattacaagttcccttctatgactaagctccgtgttcgtcagcctgctcaaatgaggagtatattgccaaagtacaatttggcggttagcaagatgagggggatcttgataagacacaaccc

SEQ ID NO: 818 - DNA, 515 bp, Artificial
  Mutation introduced by TALE nuclease pair POT32_T03 within a POT32 allele
gcaagcttgtgcaatagttgtagtacatctctcaaaactccttttacttcttcctccacttctttaacttccactcctaaaccctctcaacttttcatccatggaaaacgtaaccaaatgttcaaagtttcatgcaaggttaccaataataacggtgaccaaaaccaaaacgttgaaacgaattctgttgatcgaagaaatgttcttcttggcttaggtggtctttatggtgttgctaatgctataccattagctgcatccgctactccatctccacctcctgatctctcgtcttgtagtatagccaggattaacgaaactcatgtggtgccgtacagttgttgcgcgcctaagcctgatgatatggagaaagttccgtattacaagttcccttctatgactaagctccgtgttcgtcagcctgctcactaatgaggagtatattgccaagtacaatttggcggttagcaagatgagggatcttgataagacacaacctttaaaccctattggtt

SEQ ID NO: 819 - DNA, 429 bp, Artificial
  Mutation introduced by TALE nuclease pair POT32_T03 within a POT32 allele
gcaagcttgtgcaatagtagtagtacatctctcaaaactccttttacttcttcctccacttctttatcttccactcctaagcccctctcaacttttcatccatggaaaacgtaaccaaatgttcaaagtttcatgcaaggttaccaataataacggtgaccaaaaccaaaacgttgaaacaaattctgttgatcgaagaaatgttcttcttggcttaggtggtctttatggtgttgctaatgctataccattagctgcatccgctactccatctccacctcctgatctctcgtcttgtagtatagccaggattaacgaaactcatgtggtgccgtacagttgttgcgcgcctaagcctgatgatatggagaaagtttggcggttagcaagatgagggatcttgataagacacaacctttaaaccctatt

SEQ ID NO: 820 - DNA, 511 bp, Artificial
  Mutation introduced by TALE nuclease pair POT32_T03 within a POT32 allele
gcaagcttgtgcaatagtagtagtacatctctcaaaactccttttacttcttcctccacttctttatcttccactcctaagcccctctcaacttttcatccatggaaaacgtaaccaaatgttcaaagtttcatgcaaggttaccaataataacggtgaccaaaaccaaaacgttgaaacaattctgttgatcgaagaaatgttcttcttggcttaggtggtctttatggtgttgctaatgctataccattagctgcatccgctgctccagctccacctcctgatctctcgtcttgtagtatagccaggattaacgaaaatcaggtggtgccgtacagttgttgcgcgcctaagcctgatgatatggagaaagttccgtattacaagttcccttctatgactaagctccgtgttcgtcagcctgctcacgataatgaggagtatattgccaagtacaatctggcgattagtcgaatgaaagatcttgataagacacaacctttaaacccta

SEQ ID NO: 821 - DNA, 497 bp, Artificial
  Mutation introduced by TALE nuclease pair POT32_T03 within a POT32 allele
gcaagcttgtgcaatagttgtagtacatccctcaaaactccttttacttcttcctccacttctttaacttccactcctaaaccctctcaacttttcatccatggaaaacgtaaccaaatgttcaaagtttcatgcatggttaccaataataacggtgaccaaaaccaaaacgttgaaacgaattctgttgatcgaagaaatgttcttcttggcttaggtggtctttatggtgttgctaatgctataccattagctgcatccgctactccatctccacctcctgatctctcgtcttgtagtatagccaggattaacgaaactcatgtggtgccgtacagttgttgcgcgcctaagcctgatgatatggagaaagttccgtattacaagttcccttctatgactaagctccgtgttcgtcagcctgctaatgaggagtatattgccaagtacaatttggcggttagcaagatgagggatcttgataagacacaaccttt

SEQ ID NO: 822 - DNA, 442 bp, Artificial
  Mutation introduced by TALE nuclease pair POT32_T03 within a POT32 allele
gcaagcttgtgcaatagttgtagtacatccctcaaacatccttttacttcttcctccacttctttaacttccactcctaagccctctcaacttttcatccatggaaaacgtaaccaaatgttcaaagtttcatgcaaggttaccaataataacggtgaccaaaaccaaaacgttgaaacgaattctgttgatcgaagaaatgttcttcttggcttaggtggtctttatggtgttgctaatgctataccattagctgcatccgctgctccagctccacctcctgatctctcgtcttgtagtatagccaggattaacgaaaatcaggtggtgccgtacagttgttgcgcgcctaagcctgatgatatggagaaagttccgtattacaagttcccttctatgactaagctccttgataagacacaacctttaaaccctattggtt

SEQ ID NO: 823 - DNA, 510 bp, Artificial
  Mutation introduced by TALE nuclease pair POT32_T03 within a POT32 allele
gcaagcttgtgcaatagtagtagtacatctctcaaaactccttttacttcttcctccacttctttatcttccactcctaagcccctctcaacttttcatccatggaaaacgtaaccaaatgttcaaagtttcatgcaaggttatcaataataacggtgaccaaaacgttgaaacgaattctgttgatcgaagaaatgttcttcttggcttaggtggtctttatggtgttgctaatgctataccattagctgcatccgctgctccaactccacctcctgatctctcgtcttgtagtatagccaggattaacgaaaatcaggtggtgccgtacagttgttgcgcgcctaagcctgatgatatggagaaagttccgtattacaagttcccttctatgactaagctccgtgttcgtcagcctgctcactaatgaggagtatattgccaagtacaatctggcgattagtcgaatgaaagatcttgataagacacaacctttaaaccctattggtt

SEQ ID NO: 824 - DNA, 477 bp, Artificial
  Mutation introduced by TALE nuclease pair POT32_T03 within a POT32 allele
gcaagcttgtgcaatagttgtagtacatctctcaaaactccttttacttcttcctccacttctttaacttccactcctaagcccctctcaacttttcatccatggaaaacgtaaccaaatgttcaaagtttcatgcaaggttaccaataataacggtgaccaaaaccaaaacgttgaaacgaattctgttgatcgaagaaatgttcttcttggcttaggtggtctttatggtgttgctaatgctataccattagctgcatccgctgctccagctccacctcctgatctctcgtcttgtagtatagccaggattaacgaaaactcatgtggtgccgtacagttgttgcgcgcctaagcctgatgatatggagaaagttccgtattacaagttcccttctatgactaagctccgtgttcgtcagcctgctcataatgaggagtatattgccaagtacaatttggcggttagcaagatga

SEQ ID NO: 825 - DNA, 507 bp, Artificial
  Mutation introduced by TALE nuclease pair POT32_T03 within a POT32 allele
gcaagcttgtgcaatagttgtagtacatccctcaaaactccttttacttcttcctccacttctttaacttccactcctaaaccctctcaacttttcatccatggaaaacgtaaccaaatgttcaaagtttcatgcaaggttaccaataataacggtgaccaaaaccaaaacgttgaaacgaattctgttgatcgaagaaatgttcttcttggcttaggtggtctttatggtgttgctaatgctataccattagctgcatccgctactccatctccacctcctgatctctcgtcttgtagtatagccaggattaacgaaactcatgtggtgccgtacagttgttgcgcgcctaagcctgatgatatggagaaagttccgtattacaagttcccttctatgactaagctccgtgttcgtcagcctgctcaaatgaggagtatattgccaagtacaatttggcggttagcaagatgagggatcttgataagacacaacctttaaacccta

SEQ ID NO: 826 - DNA, 507 bp, Artificial
  Mutation introduced by TALE nuclease pair POT32_T03 within a POT32 allele
gcaagcttgtgcaatagtagtagtacatctctcaaaactccttttacttcttcctccacttctttatcttccactcctaagcccctctcaacttttcatccatggaaaacgtaaccaaatgttcaaagtttcatgcaaggttaccaataataacggtgaccaaaaccaaaacgttgaaacgaattctgttgatcgaagaaatgttcttcttggcttaggtggtctttatggtgttgctaatgctataccattagctgcatccgctactccatctccacctcctgatctctcgtcttgtagtatagccaggattaacgaaactcatgtggtgccgtacagttgttgcgcgcctaagcctgatgatatggagaaagttccgtattacaagttcccttctatgactaagctccgtgttcgtcagcctgctcatgaaggagtatattgccaagtacaatttggcggttagcaagatgagggatcttgataagacacaacctttaaacccta

SEQ ID NO: 827 - DNA, 517 bp, Artificial
  Mutation introduced by TALE nuclease pair POT32_T03 within a POT32 allele
gcaagcttgtgcaatagtagtagtacatctctcaaaactccttttacttcttcctccacttctttaacttccactcctaagcccctctcaacttttcatccatggaaaacgtaaccaaatgttcaaagtttcatgcaaggttaccaataataacggtgaccaaaaccaaaacgttgaaacgaattctgttgatcgaagaaatgttcttcttggcttaggtggtctttatggtgttgctaatgctataccattagctgcatccgctgctccagctccacctcctgatctctcgtcttgtagtatagccaggattaacgaaaatcaggtggtgccgtacagttgttgcgcgcctaagcctgatgatatggagaaagttccgtattacaagttcccttctatgactaagctccgtgttcgtcagcctgctctgataatgaggagtatattgccaagtacaatctggcgattagtcgaatgaaagatcttgataagacacaacctttaaaccctattggtt

SEQ ID NO: 828 - DNA, 516 bp, Artificial
  Mutation introduced by TALE nuclease pair POT32_T03 within a POT32 allele
gcaagcttgtgcaatagtagtagtacatctctcaaaactccttttacttcttcctccacttctttacttccactcctaagcccctctcaacttttcatccatggaaaacgtaaccaaatgttcaaagtttcatgcaaggttaccaataataacggtgaccaaaaccaaaacgttgaaacgaattctgttgatcgaagaaatgttcttcttggcttaggtggtctttatggtgttgctaatgctataccattagctgcatccgctgctccagctccacctcctgatctctcgtcttgtagtatagccaggattaacgaaaatcaggtggtgccgtacagttgttgcgcgcctaagcctgatgatatggagaaagttccgtattacaagttcccttctatgactaagctccgtgttcgtcagcctgctcagagatagaggagtatattgccaagtacaatttggcggttagcaagatgagggatcttgataagacacaacctttaaaccctattggtt

SEQ ID NO: 829 - DNA, 499 bp, Artificial
  Mutation introduced by TALE nuclease pair POT32_T03 within a POT32 allele
gcaagcttgtgcaatagtagtagtacatctctcaaaactccttttacttcttcctccacttctttaacttccactcctaagccctctcaacttttcatccatggaaaacgtaaccaaatgttcaaagtttcatgcaaggttaccaataataacggtgaccaaaaccaaaacgttgaaacgaattctgttgatcgaagaaatgttcttcttggcttaggtggtctttatggtgttgctaatgctataccattagctgcatccgctgctccagctccacctcctgatctctcgtcttgtagtatagccaggattaacgaaaatcaggtggtgccgtacagttgttgcgcgcctaagcctgatgatatggagaaagttccgtattacaagttcccttctatgactaagctccgtgttcgtcagcctgctcatatattgccaagtacaatttggcggttagcaagatgaggggatcttgataagacacaacctttaaacccta

SEQ ID NO: 830 - DNA, 513 bp, Artificial
  Mutation introduced by TALE nuclease pair POT32_T03 within a POT32 allele
  misc_feature (426): n is a or c or t or g
gcaagcttgtgcaatagtagtagtacatctctcaaaactccttttacttcttcctccacttctttatcttccactcctaagcccctctcaacttttcatccatggaaaacgtaaccaaatgttcaaagtttcatgcaaggttatcaataataacggtgaccaaaacgttgaaacgaattctgttgatcgaagaaatgttcttcttggcttaggtggtctttatggtgttgctaatgctataccattagctgcatccgctgctccaactccacctcctgatctctcgtcttgtagtatagtccaggattaacgaaaatcaggtggtgccgtacagttgttgcgcgcctaagcctgatgatatggagaaagttccgtattacaagttcccttctatgactaagctccgtgttcgtcagcctgctcagnataatgaggagtatattgccaagtacaatctggcgattagtcgaatgagagatcttgataagacacaacctttaaaccctattggtt

SEQ ID NO: 831 - DNA, 517 bp, Artificial
  Mutation introduced by TALE nuclease pair POT32_T03 within a POT32 allele
gcaagcttgtgcaatagtagtagtacatctctcaaaactccttttacttcttcctccacttctttatcttccactcctaagcccctctcaacttttcatccatggaaaacgtaaccaaatgttcaaagtttcatgcaaggttaccaataataacggtgaccaaaaccaaaacgttgaaacaaattctgttgatcgaagaaatgttcttcttggcttaggtggtctttatggtgttgctaatgctataccattagctgcatccgctgctccagctccacctcctgatctctcgtcttgtagtatagccaggattaacgaaaatcaggtggtgccgtacagttgttgcgcgcctaagcctgatgatatggagaaagttccgtattacaagttcccttctatgactaagctccgtgttcgtcagcctgctcagctaatgaggagtatattgccaagtacaatctggcgattagtcgaatgaaagatcttgataagacacaacctttaaaccctattggtt

SEQ ID NO: 832 - DNA, 505 bp, Artificial
  Mutation introduced by TALE nuclease pair POT32_T03 within a POT32 allele
gcaagcttgtgcaatagttgtagtacatccctcaaacatccttttacttcttcctccacttctttaacttccactcctaaaccctctcaacttttcatccatggaaaacgtaaccaaatgttcaaagtttcatgcatggttaccaataataacggtgaccaaaaccaaaacgttgaaacgaattctgttgatcgaagaaatgttcttcttggcttaggtggtctttatggtgttgctaatgctataccattagctgcatccgctactccatctccacctcctgatctctcgtcttgtagtatagccaggattaacgaaactcatgtggtgccgtacagttgttgcgcgcctaagcctgatgatatggagaaagttccgtattacaagttcccttctatgactaagctccgtgttcgtcagcctgctaatgaggagtatattgccaagtacaatttggcggttagcaagatgagggatcttgataagacacaacctttaaacccta

SEQ ID NO: 833 - DNA, 517 bp, Artificial
  Mutation introduced by TALE nuclease pair POT32_T03 within a POT32 allele
gcaagcttgtgcaatagtagtagtacatctctcaaaactccttttacttcttcctccacttctttaacttccactcctaagccctctcaacttttcatccatggaaaacgtaaccaaatgttcaaagtttcatgcaaggttaccaataataacggtgaccaaaaccaaaacgttgaaacgaattctgttgatcgaagaaatgttcttcttggcttaggtggtctttatggtgttgctaatgctataccattagctgcatccgctactccatctccacctcctgatctctcgtcttgtagtatagccaggattaacgaaactcatgtggtgccgtacagttgttgcgcgcctaagcctgatgatatggagaaagttccgtattacaagttcccttctatgactaagctccgtgttcgtcagcctgctcatgtaatgaggagtatattgccaagtacaatttggcggttagcaagatgaggggatcttgataagacacaacctttaaaccctattggtt

SEQ ID NO: 834 - DNA, 515 bp, Artificial
  Mutation introduced by TALE nuclease pair POT32_T03 within a POT32 allele
gcaagcttgtgcaatagttgtagtacatctctcaaaactccttttacttcttcctccacttctttaacttccactcctaaaccctctcaacttttcatccatggaaaacgtaaccaaatgttcaaagtttcatgcaaggttaccaataataacggtgaccaaaaccaaaacgttgaaacgaattctgttgatcgaagaaatgttcttcttggcttaggtggtctttatggtgttgctaatgctataccattagctgcatccgctgctccagctccacctcctgatctctcgtcttgtagtatagccaggattaacgaaaatcaggtggtgccgtacagttgttgcgcgcctaagcctgatgatatggagaaagttccgtattacaagttcccttctatgactaagctccgtgttcgtcagcctgctcactaatgaggagtatattgccaagtacaatttggcggttagcaagatgagggatcttgataagacacaacctttaaaccctattggtt

SEQ ID NO: 835 - DNA, 490 bp, Artificial
  Mutation introduced by TALE nuclease pair POT32_T03 within a POT32 allele
gcaagcttgtgcaatagtagtagtacatctctcaaaactccttttacttcttcctccacttctttatcttccactcctaagcccctctcaacttttcatccatggaaaacgtaaccaaatgttcaaagtttcatgcaaggttatcaataataacggtgaccaaaacgttgaaacgaattctgttgatcgaagaaatgttcttcttggcttaggtggtctttatggtgttgctaatgctataccattagctgcatccgctgctccaactccacctcctgatctctcgtcttgtagtatagccaggattaacgaaaatcaggtggtgccgtacagttgttgcgcgcctaagcctgatgatatggagaaagttccgtattacaagttcccttctatgactaagctccgtgttcgaatgaggagtatattgccaagtacaatctggcgattagtcgaatgagagatcttgataagacacaacctttaaacccta

SEQ ID NO: 836 - DNA, 508 bp, Artificial
  Mutation introduced by TALE nuclease pair POT32_T03 within a POT32 allele
gcaagcttgtgcaatagtagtagtacatctctcaaaactccttttacttcttcctccacttctttatcttccactcctaagcccctctcaacttttcatccatggaaaacgtaaccaaatgttcaaagtttcatgcaaggttaccaataataacggtgaccaaaaccaaaacgttgaaacaaattctgttgatcgaagaaatgttcttcttggcttaggtggtctttatggtgttgctaatgctataccattagctgcatccgctgctccagctccacctcctgatctctcgtcttgtagtatagccaggattaacgaaaatcaggtggtgccgtacagttgttgcgcgcctaagcctgatgatatggagaaagttccgtattacaagttcccttctatgactaagctccgtgttcgtcagcctgctcaaatgaggagtatattgccaagtacaatctggcgattagtcgaatgaaagatcttgataagacacaacctttaaacccta

SEQ ID NO: 837 - DNA, 484 bp, Artificial
  Mutation introduced by TALE nuclease pair POT32_T03 within a POT32 allele
gcaagcttgtgcaatagtagtagtacatctctcaaaactccttttacttcttcctccacttctttatcttccactcctaagcccctctcaacttttcatccatggaaaacgtaaccaaatgttcaaagtttcatgcaaggttatcaataataacggtgaccaaaacgttgaaacgaattctgttgatcgaagaaatgttcttcttggcttaggtggtctttatggtgttgctaatgctataccattagctgcatccgctgctccaactccacctcctgatctctcgtcttgtagtatagccaggattaacgaaaatcaggtggtgccgtacagttgttgcgcgcctaagcctgatgatatggagaaagttccgtattacaagttcccttctatgactaagctccgtgttcgtcagcctgcaatgaggagtatattgccaaagtacaatctggcgttagtcgaatgagagatcttgataagacac

SEQ ID NO: 838 - DNA, 515 bp, Artificial
  Mutation introduced by TALE nuclease pair POT32_T03 within a POT32 allele
gcaagcttgtgcaatagtagtagtacatccctcaaacatccttttacttcttcctccacttctttaacttccactcctaaaccctctcaacttttcatccatggaaaacgtaaccaaatgttcaaagtttcatgcatggttaccaataataacggtgaccaaaaccaaaacgttgaaacgaattctgttgatcgaagaaatgttcttcttggcttaggtggtctttatggtgttgctaatgctataccattagctgcatccgctactccatctccacctcctgatctctcgtcttgtagtatagccaggattaacgaaactcatgtggtgccgtacagttgttgcgcgcctaagcctgatgatatggagaaagttccgtattacaagttcccttctatgactaagctccgtgttcgtcagcctgctcgctaatgaggagtatattgccaagtacaatttggcggttagcaagatgagggatcttgataagacacaacctttaaaccctattggtt

SEQ ID NO: 839 - DNA, 483 bp, Artificial
  Mutation introduced by TALE nuclease pair POT32_T03 within a POT32 allele
gcaagcttgtgcaatagtagtagtacatctctcaaaactccttttacttcttcctccacttctttaacttccactcctaagccctctcaacttttcatccatggaaaacgtaaccaaatgttcaaagtttcatgcaaggttaccaataataacggtgaccaaaaccaaaacgttgaaacgaattctgttgatcgaagaaatgttcttcttggcttaggtggtctttatggtgttgctaatgctataccattagctgcatccgctgctccagctccacctcctgatctctcgtcttgtagtatagccaggattaacgaaaatcaggtggtgccgtacagttgttgcgcgcctaagcctgatgatatggagaaagttccgtattacaagttcccttctatgactaatgaggagtatattgccaagtacaatctggcgattagtcgaatgaaagatcttgataagacacaacctttaaaccctatt

SEQ ID NO: 840 - DNA, 518 bp, Artificial
  Mutation introduced by TALE nuclease pair POT32_T03 within a POT32 allele
gcaagcttgtgcaatagtagtagtacatctctcaaaactccttttacttcttcctccacttctttatcttccactcctaacgccctctcaacttttcatccatggaaaacgtaaccaaatgttcaaagtttcatgcaaggttaccaataataacggtgaccaaaaccaaaacgttgaaacaaattctgttgatcgaagaaatgttcttcttggcttaggtggtctttatggtgttgctaatgctataccattagctgcatccgctgctccagctccacctcctgatctctcgtcttgtagtatagccaggattaacgaaaatcaggtggtgccgtacagttgttgcgcgcctaagcctgatgatatggagaaagttccgtattacaagttcccttctatgactaagctccgtgttcgtcagcctgctcaagctaatgaggagtatattgccaagtacaatttggcggttagcaagatgagggatcttgataagacacaacctttaaaccctattggtt

SEQ ID NO: 841 - DNA, 487 bp, Artificial
  Mutation introduced by TALE nuclease pair POT32_T03 within a POT32 allele
gcaagcttgtgcaatagtagtagtacatctctcaaaactccttttacttcttcctccacttctttatcttccactcctaagcccctctcaacttttcatccatggaaaacgtaaccaaatgttcaaagtttcatgcaaggttatcaataataacggtgccaaaacgttgaaacgaattctgttgatcgaagaaatgttcttcttggcttaggtggtctttatggtgttgctaatgctataccattagctgcatccgctgctccaactccacctcctgatctctcgtcttgtagtatagccaggattaacgaaaatcaggtggtgccgtacagttgttgcgcgcctaagcctgatgatatggagaaagttccgtattacaagttcccttctatgactaagctccgtgttcgtcagcctgctcataatgaggagtatattgccaagtacaatctgggcgatttagtcgaatgagagatcttgataagac

SEQ ID NO: 842 - DNA, 516 bp, Artificial
  Mutation introduced by TALE nuclease pair POT32_T03 within a POT32 allele
gcaagcttgtgcaatagtagtagtacatctctcaaaactccttttacttcttcctccacttctttaacttccactcctaagcccctctcaacttttcatccatggaaaacgtaaccaaatgttcaaagtttcatgcaaggttaccaataataacggtgaccaaaaccaaaacgttgaaacgaattctgttgatcgaagaaatgttcttcttggcttaggtggtctttatggtgttgctaatgctataccattagctgcatccgctgctccagctccacctcctgatctctcgtcttgtagtatagccaggattaacgaaaatcaggtggtgccgtacagttgttgcgcgcctaagcctgatgatatggagaaagttccgtattacaagttcccttctatgactaagctccgtgttcgtcagcctgctcgctaatgaggagtatattgccaagtacaatctggcgattagtcgaatgaaagatcttgataagacacaacctttaaaccctattggtt

SEQ ID NO: 843 - DNA, 514 bp, Artificial
  Mutation introduced by TALE nuclease pair POT32_T03 within a POT32 allele
gcaagcttgtgcaatagtagtagtacatctctcaaaactccttttacttcttcctccacttctttatcttccactcctaagcccctctcaacttttcatccatggaaaacgtaaccaaatgttcaaagtttcatgcaaggttaccaataataacggtgaccaaaaccaaaacgttgaaacaaattctgttgatcgaagaaatgttcttcttggcttaggtggtctttatggtgttgctaatgctataccattagctgcatccgctgctccagctccacctcctgatctctcgtcttgtagtatagccaggattaacgaaaatcaggtggtgccgtacagttgttgcgcgcctaagcctgatgatatggagaaagttccgtattacaagttcccttctatgactaagctccgtgttcgtcagcctgctctaatgaggagtatattgccaagtacaatctggcgattagtcgaatgagagatcttgataagacacaacctttaaaccctattggtt

SEQ ID NO: 844 - DNA, 503 bp, Artificial
  Mutation introduced by TALE nuclease pair POT32_T03 within a POT32 allele
gcaagcttgtgcaatagtagtagtacatctctcaaaactccttttacttcttcctccacttctttatcttccactcctaagccctctcaacttttcatccatggaaaacgtaaccaaatgttcaaagtttcatgcaaggttaccaataataacggtgaccaaaaccaaaacgttgaaacgaattctgttgatcgaagaaatgttcttcttggcttaggtggtctttatggtgttgctaatgctataccattagctgcatccgctgctccagctccacctcctgatctctcgtcttgtagtatagccaggattaacgaaaatcaggtggtgccgtacagttgttgcgcgcctaagcctgatgatatggagaaagttccgtattacaagttcccttctatgactaagctccgtgttcgtcagcgctaatgaggagtatattgccaagtacaatttggcggttagcaagatgagggatcttgataagacacaacctttaaacccta

SEQ ID NO: 845 - DNA, 499 bp, Artificial
  Mutation introduced by TALE nuclease pair POT32_T03 within a POT32 allele
  misc_feature (421): n is a or c or t or g
gcaagcttgtgcaatagtagtagtaccactctcaaaactccttttacttcttcctccacttctttatcttccactcctaagccctctcaacttttcctccatggaaaacgtaacaaaacgttcaaagtttcatgcaaggttaccaataataacggtgaccaaaaccaaaacgttgaaacgaattctgttgatcgaagaaatgttcttcttggcttaggtggtctttatggtgttgctaatgctataccattagctgcatccgctactccatctccacctcctgatctctcatcttgtagtaaaagcaaagattatgaaactacggaggtgccatacagttgttgcgctcccacgcctaaagatatgaagaaagttccatattacaagttcccttctatgactaagctccgtattcgtcccngcgaggagtatattgccaagtacaatttggcggttagcaagatgagggatcttgataagacacaacctttaaacccta

SEQ ID NO: 846 - DNA, 501 bp, Artificial
  Mutation introduced by TALE nuclease pair POT32_T03 within a POT32 allele
gcaagcttgtgcaatagtagtagtacatctctcaaaactccttttacttcttcctccacttctttatcttccactcctaagccctctcaacttttcatccatggaaaacgtaaccaaatgttcaaagtttcatgcaaggttaccaataataacggtgaccaaaaccaaaacgttgaaacaaattctgttgatcgaagaaatgttcttcttggcttaggtggtctttatggtgttgctaatgctataccattagctgcatccgctgctccaactccacctcctgatctctcgtcttgtagtatagccaggattaacgaaaatcaggtggtgccgtacagttgttgcgcgcctaagcctgatgatatggagaaagttccgtattacaagttcccttctatgactaagctccgtgttcgtcagcctgctcggagtatattgccaagtacaatctggcgattagtcgaatgagagatcttgataagacacaacctttaaacccta

SEQ ID NO: 847 - DNA, 461 bp, Artificial
  Mutation introduced by TALE nuclease pair POT32_T03 within a POT32 allele
gcaagcttgtgcaatagtagtagtacatcctcatcaaactccttttacttcttcctccacttctttatcttccactcctaagcccctctcaacttttcatccatggaaaacgtaaccaaatgttcaaagtttcatgcaaggttaccaataataacggtgaccaaaaccaaaacgttgaaacgaattctgttgatcgaagaaatgttcttcttggcttaggtggtctttatggtgttgctaatgctataccattagctgcatccgctgctccagctccacctcctgatctctcgtcttgtagtatagccaggattaacgaaaatcaggtggtgccgtacagttgttgcgcgcctaagcctgatgatatggagaaagttccgtattacaagttcccttctatgactaagctccgtgttcgtcagcctgctctatagaggagtatattgccaagtacaattgcg

SEQ ID NO: 848 - DNA, 515 bp, Artificial
  Mutation introduced by TALE nuclease pair POT32_T03 within a POT32 allele
gcaagcttgtgcaatagtagtagtacatctctcaaaactccttttacttcttcctccacttctttatcttccactcctaagcccctctcaacttttcatccatggaaaacgtaaccaaatgttcaaagtttcatgcaaggttaccaataataacggtgaccaaaaccaaaacgttgaaacgaattctgttgatcgaagaaatgttcttcttggcttaggtggtctttatggtgttgctaatgctataccattagctgcatccgctgctccagctccacctcctgatctctcgtcttgtagtatagccaggattaacgaaaatcaggtggtgccgtacagttgttgcgcgcctaagcctgatgatatggagaaagttccgtattacaagttcccttctatgactaagctccgtgttcgtcagcctgctcataatgaggagtatattgccaagtacaatctggcgattagtcgaatgaaagatcttgataagacacaacctttaaaccctattggtt

SEQ ID NO: 849 - DNA, 490 bp, Artificial
  Mutation introduced by TALE nuclease pair POT32_T03 within a POT32 allele
gcaagcttgtgcaatagtagtagtacatctctcaaaactccttttacttcttcctccacttctttatcttccactcctaagcccctctcaacttttcatccatggaaaacgtaaccaaatgttcaaagtttcatgcaaggttaccaataataacggtgaccaaaaccaaaacgttgaaacgaattctgttgatcgaagaaatgttcttcttggcttaggtggtctttatggtgttgctaatgctataccattagctgcatccgctgctccagctccacctcctgatctctcgtcttgtagtatagccaggattaacgaaaatcaggtggtgccgtacagttgttgcgcgcctaagcctgatgatatggagaaagttccgtattacaagttcccttctatgactaagctccgtgttcgtcagcctaatgaggagtatattgccaagtacaatttggcggttagcaagatgagggatcttgataagacacaa

SEQ ID NO: 850 - DNA, 508 bp, Artificial
  Mutation introduced by TALE nuclease pair POT32_T03 within a POT32 allele
gcaagcttgtgcaatagtagtagtacatctctcaaaactccttttacttcttcctccacttctttaacttccactcctaagcccctctcaacttttcatccatggaaaacgtaaccaaatgttcaaagtttcatgcaaggttaccaataataacggtgaccaaaaccaaaacgttgaaacgaattctgttgatcgaagaaatgttcttcttggcttaggtggtctttatggtgttgctaatgctataccattagctgcatccgctgctccagctccacctcctgatctctcgtcttgtagtatagccaggattaacgaaaatcaggtggtgccgtacagttgttgcgcgcctaagcctgatgatatggagaaagttccttattacaagttcccttctatgactaagctccgtgttcgtcagcctgctcaaatgaggagtatattgccaagtacaatctggcgattagtcgaatgaaagatcttgataagacacaacctttaaacccta

SEQ ID NO: 851 - DNA, 516 bp, Artificial
  Mutation introduced by TALE nuclease pair POT32_T03 within a POT32 allele
gcaagcttgtgcaatagtagtagtacatctctcaaaactccttttacttcttcctccacttctttaacttccactcctaagccctctcaacttttcatccatggaaaacgtaaccaaatgttcaaagtttcatgcaaggttaccaataataacggtgaccaaaaccaaaacgttgaaacaattctgttgatcgaagaaatgttcttcttggcttaggtggtctttatggtgttgctaatgctataccattagctgcatccgctgctccagctccacctcctgatctctcgtcttgtagtatagccaggattaacgaaaatcaggtggtgccgtacagttgttgcgcgcctaagcctgatgatatggagaaagttccgtattacaagttcccttctatgactaagctccgtgttcgtcagcctgctcatgataatgaggagtatattgccaagtacaatctggcgattagtcgaatgaaagatcttgataagacacaacctttaaaccctattggtt

SEQ ID NO: 852 - DNA, 494 bp, Artificial
  Mutation introduced by TALE nuclease pair POT32_T03 within a POT32 allele
gcaagcttgtgcaatagttgtagtacatccctcaaacatccttttacttcttcctccacttctttaacttccactcctaaaccctctcaacttttcatccatggaaaacgtaaccaaatgttcaaagtttcatgcatggttaccaataataacggtgaccaaaaccaaaacgttgaaacgaattctgttgatcgaagaaatgttcttcttggcttaggtggtctttatggtgttgctaatgctataccattagctgcatccgctactccatctccacctcctgatctctcgtcttgtagtatagccaggattaacgaaactcatgtggtgccgtacagttgttgcgtgcctaagcctgatgatatggagaaagttccgtattacaagttcccttctatgactaagctccgtgttcgtcagcctgctcaaatgaggagtatattgccaagtacaatttggcggttagcaagatgagggatcttgataagacacaa

SEQ ID NO: 853 - DNA, 494 bp, Artificial
  Mutation introduced by TALE nuclease pair POT32_T03 within a POT32 allele
gcaagcttgtgcaatagtagtagtacatctctcaaaactccttttacttcttcctccacttctttatcttccactcctaagcccctctcaacttttcatccatggaaaacgtaaccaaatgttcaaagtttcatgcaaggttatcaataataacggtgaccaaaacgttgaaacgaattctgttgatcgaagaaatgttcttcttggcttaggtggtctttatggtgttgctaatgctataccattagctgcatccgctgctccaactccacctcctgatctctcgtcttgtagtatagccaggattaacgaaaatcaggtggtgccgtacagttgttgcgcgcctaagcctgatgatatggagaaagttccgtattacaagttcccttctatgactaagctccgtgttcgtcagcctgctcaaatgaggagtatattgccaagtacaatctggcgattagtcgaatgagagatcttgataagacacaaccttt

SEQ ID NO: 854 - DNA, 515 bp, Artificial
  Mutation introduced by TALE nuclease pair POT32_T03 within a POT32 allele
gcaagcttgtgcaatagtagtagtacatctctcaaaactccttttacttcttcctccacttctttaacttccactcctaagccctctcaacttttcatccatggaaaacgtaaccaaatgttcaaagtttcatgcaaggttaccaataataacggtgaccaaaaccaaaacgttgaaacgaattctgttgatcgaagaaatgttcttcttggcttaggtggtctttatggtgttgctaatgctataccattagctgcatccgctgctccagctccacctcctgatctctcgtcttgtagtatagccaggattaacgaaaatcaggtggtgccgtacagttgttgcgcgcctaagcctgatgatatggagaaagttccgtattacaagttcccttctatgactaagctccgtgttcgtcagcctgctcactaatgaggagtatattgccaagtacaatctggcgattagtcgaatgaaagatcttgataagacacaacctttaaaccctattggtt

SEQ ID NO: 855 - DNA, 515 bp, Artificial
  Mutation introduced by TALE nuclease pair POT32_T03 within a POT32 allele
gcaagcttgtgcaatagtagtagtacatctctcaaaactccttttacttcttcctccacttctttaacttccactcctaagccctctcaacttttcatccatggaaaacgtaaccaaatgttcaaagtttcatgcaaggttaccaataataacggtgaccaaaaccaaaacgttgaaacgaattctgttgatcgaagaaatgttcttcttggcttaggtggtctttatggtgttgctaatgctataccattagctgcatccgctgctccagctccacctcctgatctctcgtcttgtagtatagccaggattaacgaaaatcaggtggtgccgtacagttgttgcgcgcctaagcctgatgatatggagaaagttccgtattacaagttcccttctatgactaagctccgtgttcgtcagcctgctcatgaatgaggagtatattgccaagtacaatttggcggttagcaagatgagggatcttgataagacacaacctttaaaccctattggtt

SEQ ID NO: 856 - DNA, 461 bp, Artificial
  Mutation introduced by TALE nuclease pair POT32_T03 within a POT32 allele
gcaagcttgtgcaatagtagtagtacatctctcaaaactccttttacttcttcctccacttctttatcttccactcctaagcccctctcaacttttcatccatggaaaacgtaaccaaatgttcaaagtttcatgcaaggttaccaataataacggtgaccaaaaccaaaacgttgaaacaattctgttgatcgaagaaatgttcttcttggcttaggtggtctttatggtgttgctaatgctataccattagctgcatccgctgctccagctccacctcctgatctctcgtcttgtagtatagccaggattaacgaaaatcaggtggtgccgtacagttgttgcgcgcctaagcctgatgatatggagaaagttccgtattacaagttcccttctatgactaagctccgtgttcgtcagcctgctctagatagaggagtatattgccaagtacaattgcg

SEQ ID NO: 857 - DNA, 498 bp, Artificial
  Mutation introduced by TALE nuclease pair POT32_T03 within a POT32 allele
gcaagcttgtgcaatagtagtagtaccactctcaaaactccttttacttcttcctccacttctttatcttccactcctaagcccctctcaacttttcctccatggaaaacgtaacaaaacgttcaaagtttcatgcaaggttaccaataataacggtgaccaaaacgttgaaacgaattctgttgatcgaagaaatgttcttcttggcttaggtggtctttatggtgttgctaatgctataccattagctgcatccgctactccagctccacctcctgatctctcatcttgtagtaaagcaaagattaatgaaactacggaggtgccatacagttgttgcgctcccacgccaaaagatatgaagaaagttccatattacaagttcccttctatgactaagctccgtattcgtcccctgctctgaggagtatattgccaagtacaatttggcggttagcaagatgagggatcttgataagacacaacctttaaacccta

SEQ ID NO: 858 - DNA, 508 bp, Artificial
  Mutation introduced by TALE nuclease pair POT32_T03 within a POT32 allele
gcaagcttgtgcaatagtagtagtacatctctcaaaactccttttacttcttcctccacttctttatcttccactcctaagcccctctcaacttttcatccatggaaaacgtaaccaaatgttcaaagtttcatgcaaggttaccaataataacggtgaccaaaaccaaaacgttgaaacaaattctgttgatcgaagaaatgttcttcttggcttaggtggtctttatggtgttgctaatgctataccattagctgcatccgctgctccagctccacctcctgatctctcgtcttgtagtatagccaggattaacgaaaatcaggtggtgccgtacagttgttgcgcgcctaagcctgatgatatggagaaagttccgtattacaagttcccttctatgactaagctccgtgttcgtcagcctgctcatgaggagtatattgccaagtacaatttggcggttagcaagatgagggatcttgataagacacaacctttaaaccctatt

SEQ ID NO: 859 - DNA, 465 bp, Artificial
  Mutation introduced by TALE nuclease pair POT32_T03 within a POT32 allele
gcaagcttgtgcaatagtagtagtacatctctcaaaactccttttacttcttcctccacttctttaacttccactcctaagcccctctcaacttttcatccatggaaaacgtaaccaaatgttcaaagtttcatgcaaggttaccaataataacggtgaccaaaaccaaaacgttgaaacgaattctgttgatcgaagaaatgttcttcttggcttaggtggtctttatggtgttgctaatgctataccataagctgcatccgctgctccagctccaccctcctgatctctcgtcttgtagtatagccaggattaaacgaaaatcaggtggtgccgtacagttgttgcgcgcctaagcctgatgatatggagaaagttccgtattacaagttcccttctatgactaagctccgtgttcgtcagcctgctcatagatagaggagtatattgccaagtacaattgcg

SEQ ID NO: 860 - DNA, 512 bp, Artificial
  Mutation introduced by TALE nuclease pair POT32_T03 within a POT32 allele
  misc_feature (430): n is a or c or t or g
gcaagcttgtgcaatagtagtagtacatctctcaaaactccttttacttcttcctccacttctttatcttccactcctaagcccctctcaacttttcatccatggaaaacgtaaccaaatgttcaaagtttcatgcaaggttaccaataataacggtgaccaaaaccaaaacgttgaaacaaattctgttgatcgaagaaatgttcttcttggcttaggtggtctttatggtgttgctaatgctataccattagctgcatccgctgctccagctccacctcctgatctctcgtcttgtagtatagccaggattaacgaaaatcaggtggtgccgtacagttgttgcgcgcctaagcctgatgatatggagaaagttccgtattacaagttcccttctatgactaagctccgtgttcgtcagcctgctcangataatgaggagtatattgccaagtacaatctggcgattagtcgaatgaaagatcttgataagacacaacctttaaacccta

SEQ ID NO: 861 - DNA, 455 bp, Artificial
  Mutation introduced by TALE nuclease pair POT32_T03 within a POT32 allele
gcaagcttgtgcaatagtagtagtacatctctcaaaactccttttacttcttcctccacttctttaacttccactcctaaaccctctcaacttttcatccatggaaaacgtaaccaaatgttcaaagtttcatgcaaggttaccaataataacggtgaccaaaaccaaaacgttgaaacgaattctgttgatcgaagaaatgttcttcttggcttgtggtcgttatgtgttgctaatgactataccattagctgcatccgctactccatctccacctcctgatctctcgtcttgtagtatagccaggattaacgaaactcatgtggtgccgtacagttgttgcgcgcctaagcctgatgatatggagaaagttccgtattacaagttcccttctatgactaagctccgtgttcgtcagcctgctcactaatgagggagtatattgccaagtacaa

SEQ ID NO: 862 - DNA, 466 bp, Artificial
  Mutation introduced by TALE nuclease pair POT32_T03 within a POT32 allele
  misc_feature (273): n is a or c or t or g
gcaagcttgtgcaatagtagtagtacatctctcaaaactccttttacttcttcctccacttctttaacttccactcctaagcccctctcaacttttcatccatggaaaacgtaaccaaatgttcaaagtttcatgcaaggttaccaataataacggtgaccaaaaccaaaacgttgaaacgaattctgttgatcgaagaaatgttcttcttggcttaggtggtctttatggtgttgctaatgctataccattagctgcatccgctactccatntccacctcctgatctctcgtcttgtagtatagccaggattaacgaaaactcatgtggtgccgtacagttgttgcgcgcctaagcctgatgatatggagaaagttccgtattacaagttcccttctatgactaagctccgtgttcgtcagcctgctcagcgataatgaggagtatattgccaagtacaattgcg

SEQ ID NO: 863 - DNA, 508 bp, Artificial
  Mutation introduced by TALE nuclease pair POT32_T03 within a POT32 allele
gcaagcttgtgcaatagtagtagtacatctctcaaaactccttttacttcttcctccacttctttaacttccactcctaagcccctctcaacttttcatccatggaaaacgtaaccaaatgttcaaagtttcatgcaaggttaccaataataacggtgaccaaaaccaaaacgttgaaacgaattctgttgatcgaagaaatgttcttcttggcttaggtggtctttatggtgttgctaatgctataccattagctgcatccgctgctccagctccacctcctgatctctcgtcttgtagtatagccaggattaacgaaaatcaggtggtgccgtacagttgttgcgcgcctaagcctgatgatatggagaaagttccgtattacaagttcccttctatgactaagctccgtgttcgtcagcctgctcaaatgaggagtatattgccaagtacaatctggcgattagtcgaatgagagatcttgataagacacaacctttaaacccta

SEQ ID NO: 864 - DNA, 483 bp, Artificial
  Mutation introduced by TALE nuclease pair POT32_T03 within a POT32 allele
gcaagcttgtgcaatagtagtagtacatctctcaaaactccttttacttcttcctccacttctttaacttccactcctaagccctctcaacttttcatccatggaaaacgtaaccaaatgttcaaagtttcatgcaaggttaccaataataacggtgaccaaaaccaaaacgttgaaacgaattctgttgatcgaagaaatgttcttcttggcttaggtggtctttatggtgttgctaatgctataccattagctgcatccgctgctccagctccacctcctgatctctcgtcttgtagtatagccaggattaacgaaaatcaggtggtgccgtacagttgttgcgcgcctaagcctgatgatatggagaaagttccgtattacaagttcccttctatgactaagctccgtgttcgtcagcctgctctaatgaggagtatattgccaagtacaatttggcggttagcaagatgagggatcttg

SEQ ID NO: 865 - DNA, 510 bp, Artificial
  Mutation introduced by TALE nuclease pair POT32_T03 within a POT32 allele
gcaagcttgtgcaatagtagtagtacatctctcaaaactccttttacttcttcctccacttctttatcttccactcctaagccctctcaacttttcatccatggaaaacgtaaccaaatgttcaaagtttcatgcaaggttacataataacgtgacaaaccaaaacgttgaaacgaattctgttgatcgaagaaatgttcttcttggcttaggtggtctttatggtgttgctaatgctataccattagctgcatccgctgctccagctccacctcctgatctctcgtcttgtagtatagccaggattaacgaaaatcaggtggtgccgtacagttgttgcgcgcctaagcctgatgatatggagaaagttccgtattacaagttcccttctatgactaagctccgtgttcgtcagcctgctcactaatgaggagtatattgccaagtacaatctggcgattagtcgaatgagagatcttgataagacacaacctttaaaccctattggtt

SEQ ID NO: 866 - DNA, 517 bp, Artificial
  Mutation introduced by TALE nuclease pair POT32_T03 within a POT32 allele
gcaagcttgtgcaatagtagtagtacatctctcaaaactccttttacttcttcctccacttctttaacttccactcctaagcccctctcaacttttcatccatggaaaacgtaaccaaatgttcaaagtttcatgcaaggttaccaataataacggtgaccaaaaccaaaacgttgaaacgaattctgttgatcgaagaaatgttcttcttggcttaggtggtctttatggtgttgctaatgctataccattagctgcatccgctgctccagctccacctcctgatctctcgtcttgtagtatagccaggattaacgaaaatcaggtggtgccgtacagttgttgcgcgcctaagcctgatgatatggagaaagttccgtattacaagttcccttctatgactaagctccgtgttcgtcagcctgctcagagatagaggagtatattgccaagtacaatttggcggttagcaagatgagggatcttgataagacacaacctttaaaccctattggtt

SEQ ID NO: 867 - DNA, 494 bp, Artificial
  Mutation introduced by TALE nuclease pair POT32_T03 within a POT32 allele
gcaagcttgtgcaatagtagtagtacatctctcaaaactccttttacttcttcctccacttctttatcttccactcctaagccctctcaacttttcatccatggaaaacgtaaccaaatgttcaaagtttcatgcaaggttaccaataataacggtgaccaaaaccaaaacgttgaaacgaattctgttgatcgaagaaatgttcttcttggcttaggtggtctttatggtgttgctaatgctataccattagctgcatccgctgctccagctccacctcctgatctctcgtcttgtagtatagccaggattaacgaaaatcaggtggtgccgtacagttgttgcgcgcctaagcctgatgatatggagaaagttccgtattacaagttcccttctatgactaagctccgtgttcgtcagcctgctcaaatgaggagtatattgccaagtacaatttggcggttagcaagatgagggatcttgataagacacaa

SEQ ID NO: 868 - DNA, 493 bp, Artificial
  Mutation introduced by TALE nuclease pair POT32_T03 within a POT32 allele
gcaagcttgtgcaatagttgtagtacatctctcaaaactccttttacttcttcctccacttctttaacttccactcctaaaccctctcaacttttcatccatggaaaacgtaaccaaatgttcaaagtttcatgcaaggttaccaataataacggtgaccaaaaccaaaacgttgaaacgaattctgttgatcgaagaaatgttcttcttggcttaggtggtctttatggtgttgctaatgctataccattagctgcatccgctactccatctccacctcctgatctctcgtcttgtagtatagccaggattaacgaaactcatgtggtgccgtacagttgttgcgcgcctaagcctgatgatatggagaaagttccgtattacaagttcccttctatgactaagctccgtgttcgtcagcctgctcaatgaggagtatattgccaagtacaatttggcggttagcaagatgagggatcttgataagacacaa

SEQ ID NO: 869 - DNA, 515 bp, Artificial
  Mutation introduced by TALE nuclease pair POT32_T03 within a POT32 allele
gcaagcttgtgcaatagtagtagtacatctctcaaaactccttttacttcttcctccacttctttaacttccactcctaagcccctctcaacttttcatccatggaaaacgtaaccaaatgttcaaagtttcatgcaaggttaccaataataacggtgaccaaaaccaaaacagttgaaacaattctgttgatcgaagaaatgttcttcttggcttaggtggtctttatggtgttgctaatgctataccattagctgcatccgctgctccagctccacctcctgatctctcgtcttgtagtatagccaggattaacgaaaatcaggtggtgccgtacagttgttgcgcgcctaagcctgatgatatggagaaagttccgtattacaagttcccttctatgactaagctccgtgttcgtcagcctgctcatcataatgaggagtatattgccaagtacaatctggcgattagtcgaatgaaagatcttgataagacacaacctttaaaccctattg

SEQ ID NO: 870 - DNA, 464 bp, Artificial
  Mutation introduced by TALE nuclease pair POT32_T03 within a POT32 allele
gcaagcttgtgcaatagttgtagtacatccctcaaaacatccttttacttcttcctccacttctttaacttccactcctaaaccctctcaacttttcatccatggaaaacgtaaccaaatgttcaaagtttcatgcatggttaccaataataacggtgaccaaaaccaaaacgttgaaacgaattctgttgatcgaagaaatgttcttcttggcttaggtggtctttatggtgttgctaatgctataccattagctgcatccgctactccatctccacctcctgatctctcgtcttgtagtatagccaggattaacgaaactcatgtggtgccgtacagttgttgcgcgcctaagcctgatgatatggagaaagttccgtattacaagttcccttctatgactaagctccgtgttcgtcagcctgctcatatagaggagtatattgccaagtacaattgcgttg

SEQ ID NO: 871 - DNA, 497 bp, Artificial
  Mutation introduced by TALE nuclease pair POT32_T03 within a POT32 allele
gcaagcttgtgcaatagtagtagtaccactctcaaaactccttttacttcttcctccacttctttatcttccactcctaagccctctcaacttttcctccatggaaaacgtaacaaaacgttcaaagtttcatgcaaggttaccaataataacggtgaccaaaacgttgaaacgaattctgttgatcgaagaaatgttcttcttggcttaggtggtctttatggtgttgctaatgctataccattagctgcatccgctactccagctccacctcctgatctctcatcttgtagtaaagcaaagattaatgaaactacggaggtgccatacagttgttgcgctcccacgccaaaagatatgaagaaagttccatattacaagttcccttctatgactaagctccgtattcgtcccctgctctgaggagtatattgccaagtacaatttggcggttagcaagatgagggatcttgataagacacaacctttaaacccta

SEQ ID NO: 872 - DNA, 487 bp, Artificial
  Mutation introduced by TALE nuclease pair POT32_T03 within a POT32 allele
gcaagcttgtgcaatagtagtagtacatctctcaaaactccttttacttcttcctccacttctttaacttccactcctaagccctctcaacttttcatccatggaaaacgtaaccaaatgttcaaagtttcatgcaaggttaccaataataacggtgaccaaaaccaaaacgttgaaacgaattctgttgatcgaagaaatgttcttcttggcttaggtggtctttatggtgttgctaatgctataccattagctgcatccgctgctccagctccacctcctgatctctcgtcttgtagtatagccaggattaacgaaaatcaggtggtgccgtacagttgttgcgcgcctaagcctgatgatatggagaaagttccgtattacaagttcccttctatgactaagctccgtgttcgtcagcctgctcactaatgaggagtatattgccaagtacaatctggcgattagtcgaatgaaagatcttgat

SEQ ID NO: 873 - DNA, 487 bp, Artificial
  Mutation introduced by TALE nuclease pair POT32_T03 within a POT32 allele
gcaagcttgtgcaatagtagtagtacatctctcaaaactccttttacttcttcctccacttctttatcttccactcctaagcccctctcaacttttcatccatggaaaacgtaaccaaatgttcaaagtttcatgcaaggttatcaataataacggtgccaaaacgttgaaacgaattctgttgatcgaagaaatgttcttcttggcttaggtggtctttatggtgttgctaatgctataccattagctgcatccgctgctccaactccacctcctgatctctcgtcttgtagtatagccaggattaacgaaaatcaggtggtgccgtacagttgttgcgcgcctaagcctgatgatatggagaaagttccgtattacaagttcccttctatgactaagctccgtgttcgtcagcctgcaatgaggagtatattgccaagtacaatctggcgttagtcgaatgagagatcttgataagacacaaccc

SEQ ID NO: 874 - DNA, 510 bp, Artificial
  Mutation introduced by TALE nuclease pair POT32_T03 within a POT32 allele
gcaagcttgtgcaatagtagtagtacatctctcaaaactccttttacttcttcctccacttctttatcttccactcctaagcccctctcaacttttcatccatggaaaacgtaaccaaatgttcaaagtttcatgcaaggttatcaataataacggtgaccaaaacgttgaaacgaattctgttgatcgaagaaatgttcttcttggcttaggtggtctttatggtgttgctaatgctataccattagctgcatccgctgctccaactccacctcctgatctctcgtcttgtagtatagccaggattaacgaaaatcaggtggtgccgtacagttgttgcgcgcctaagcctgatgatatggagaaagttccgtattatcctagttcccttctatgactaagctcgtgttcgtcagcctgctcataatgaggagtatattgccaagtacaatctggcgattagtcgaatgagagatcttgataagacacaacctttaaaccctattggtt

SEQ ID NO: 875 - DNA, 518 bp, Artificial
  Mutation introduced by TALE nuclease pair POT32_T03 within a POT32 allele
  misc_feature (431): n is a or c or t or g
gcaagcttgtgcaatagtagtagtacatctctcaaaactccttttacttcttcctccacttctttaacttccactcctaagcccctctcaacttttcatccatggaaaacgtaaccaaatgttcaaagtttcatgcaaggttaccaataataacggtgaccaaaaccaaaacgttgaaacaaattctgttgatcgaagaaatgttcttcttggcttaggtggtctttatggtgttgctaatgctataccattagctgcatccgctgctccagctccacctcctgatctctcgtcttgtagtatagccaggattaacgaaaatcaggtggtgccgtacagttgttgcgcgcctaagcctgatgatatggagaaagttccgtattacaagttcccttctatgactaagctccgtgttcgtcagcctgctcatnataatgaggagtatattgccaagtacaatctggcgattagtcgaatgaaagatcttgataagacacaacctttaaaccctattggtt

SEQ ID NO: 876 - DNA, 489 bp, Artificial
  Mutation introduced by TALE nuclease pair POT32_T03 within a POT32 allele
gcaagcttgtgcaatagtagtagtacatctctcaaaactccttttacttcttcctccacttctttaacttccactcctaagcccctctcaacttttcatccatggaaaacgtaaccaaatgttcaaagtttcatgcaaggttaccaataataacggtgaccaaaaccaaaacgttgaaacgaattctgttgatcgaagaaatgttcttcttggcttaggtggtctttatggtgttgctaatgctataccattagctgcatccgctgctccagctccacctcctgatctctcgtcttgtagtatagccaggattaacgaaaatcaggtggtgccgtacagttgttgcgcgcctaagcctgatgatatggagaaagttccgtattacaagttcccttctatgactaagctccgtgttcgtcagcctgctcatatattgccaagtacaatttggcggttagcaagatgaggggatcttgataagacacaacc

SEQ ID NO: 877 - DNA, 511 bp, Artificial
  Mutation introduced by TALE nuclease pair POT32_T03 within a POT32 allele
  misc_feature (429): n is a or c or t or g
gcaagcttgtgcaatagtagtagtacatctctcaaaactccttttacttcttcctccacttctttatcttccactcctaagcccctctcaacttttcatccatggaaaacgtaaccaaatgttcaaagtttcatgcaaggttaccaataataacggtgaccaaaaccaaaacgttgaaacaattctgttgatcgaagaaatgttcttcttggcttaggtggtctttatggtgttgctaatgctataccattagctgcatccgctgctccagctccacctcctgatctctcgtcttgtagtatagccaggattaacgaaaatcaggtggtgccgtacagttgttgcgcgcctaagcctgatgatatggagaaagttccgtattacaagttcccttctatgactaagctccgtgttcgtcagcctgctcangataatgaggagtatattgccaagtacaatctggcgattagtcgaatgaaagatcttgataagacacaacctttaaacccta

SEQ ID NO: 878 - DNA, 507 bp, Artificial
  Mutation introduced by TALE nuclease pair POT32_T03 within a POT32 allele
gcaagcttgtgcaatagtagtagtacatctctcaaaactccttttacttcttcctccacttctttatcttccactcctaagccctctcaacttttcatccatggaaaacgtaaccaaatgttcaaagtttcatgcaaggttaccaataataacggtgaccaaaaccaaaacgttgaaacgaattctgttgatcgaagaaatgttcttcttggcttaggtggtctttatggtgtcgctaatgctataccattagctgcatccgctactccatctccacctcctgatctctcatcttgtagtaaagcaaagattaatgaaactacggaggtgccatacagttgttgcgctcccacgcctaaagatatgaagaaagttccatattacaagttcccttctatgactaagctccgtattcgtcccctgctcaatgaggagtatattgccaagtacaatttggcggttagcaagatgagggatcttgataagacacaacctttaaaccctatt

SEQ ID NO: 879 - DNA, 488 bp, Artificial
  Mutation introduced by TALE nuclease pair POT32_T03 within a POT32 allele
gcaagcttgtgcaatagtagtagtaccactctcaaaactccttttacttcttcctccacttctttatcttccactcctaagccctctcaacttttcctccatggaaaacgtaacaaaacgttcaaagtttcatgcaaggttaccaataataacggtgaccaaaacgttgaaacgaattctgttgatcgaagaaatgttcttcttggcttaggtggtctttatggtgttgctaatgctataccattagctgcatccgctactccagctccacctcctgatctctcatcttgtagtaaagcaaagattaatgaaactacggaggtgccatacagttgttgcgctcccacgccaaaagatatgaagaaagttccatattacaagttcccttctatgactaagctccgtattcgtcccctgctcataatgaggagtatattgccaagtacaatttggcggttagcaagatgagggatcttgataagacacaa

SEQ ID NO: 880 - DNA, 443 bp, Artificial
  Mutation introduced by TALE nuclease pair POT32_T03 within a POT32 allele
gcaagcttgtgcaatagttgtagtacatccctcaaacatccttttacttcttcctccacttctttaacttccactcctaagcccctctcaacttttcatccatggaaaacgtaaccaaatgttcaaagtttcatgcaaggttaccaataataacggtgaccaaaaccaaaacgttgaaacgaattctgttgatcgaagaaatgttcttcttggcttaggtggtctttatggtgttgctaatgctataccattagctgcatccgctgctccagctccacctcctgatctctcgtcttgtagtatagccaggattaacgaaaatcaggtggtgccgtacagttgttgcgcgcctaagcctgatgatatggagaaagttccgtattacaagttcccttctatgactaagctccttgataagacacaacctttaaaccctattggtt

SEQ ID NO: 881 - DNA, 507 bp, Artificial
  Mutation introduced by TALE nuclease pair POT32_T03 within a POT32 allele
gcaagcttgtgcaatagtagtagtacatctctcaaaactccttttacttcttcctccacttctttatcttccactcctaagccctctcaacttttcatccatggaaaacgtaaccaaatgttcaaagtttcatgcaaggttaccaataataacggtgaccaaaaccaaaacgttgaaacgaattctgttgatcgaagaaatgttcttcttggcttaggtggtctttatggtgttgctaatgctataccattagctgcatccgctgctccagctccacctcctgatctctcgtcttgtagtatagccaggattaacgaaaatcaggtggtgccgtacagttgttgcgcgcctaagcctgatgatatggagaaagttccgtattacaagttcccttctatgactaagctccgtgttcgtcagcctgctcaaatgaggagtatattgccaagtacaatttggcggttagcaagatgagggatcttgataagacacaacctttaaacccta

SEQ ID NO: 882 - DNA, 500 bp, Artificial
  Mutation introduced by TALE nuclease pair POT32_T03 within a POT32 allele
gcaagcttgtgcaatagtagtagtacatctctcaaaactccttttacttcttcctccacttctttatcttccactcctaagccctctcaacttttcatccatggaaaacgtaaccaaatgttcaaagtttcatgcaaggttaccaataataacggtgaccaaaaccaaaacgttgaaacgaattctgttgatcgaagaaatgttcttcttggcttaggtggtctttatggtgttgctaatgctataccattagctgcatccgctgctccagctccacctcctgatctctcgtcttgtagtatagccaggattaacgaaaatcaggtggtgccgtacagttgttgcgcgcctaagcctgatgatatggagaaagttccgtattacaagttcccttctatgactaagctccgtgttcgtcagcctgctcaaatgaggagtatattgccaagtacaatttggcggttagcaagatgagggatcttgataagacacaacccttt

SEQ ID NO: 883 - DNA, 514 bp, Artificial
  Mutation introduced by TALE nuclease pair POT32_T03 within a POT32 allele
gcaagcttgtgcaatagtagtagtacatctctcaaaactccttttacttcttcctccacttctttaacttccactcctaagccctctcaacttttcatccatggaaaacgtaaccaaatgttcaaagtttcatgcaaggttaccaataataacggtgaccaaaaccaaaacgttgaaacgaattctgttgatcgaagaaatgttcttcttggcttaggtggtctttatggtgttgctaatgctataccattagctgcatccgctgctccagctccacctcctgatctctcgtcttgtagtatagccaggattaacgaaaatcaggtggtgccgtacagttgttgcgcgcctaagcctgatgatatggagaaagttccgtattacaagttcccttctatgactaagctccgtgttcgtcagcctgctcataatgaggagtatattgccaagtacaatttggcggttagcaagatgagggatcttgataagacacaacctttaaaccctattggtt

SEQ ID NO: 884 - DNA, 486 bp, Artificial
  Mutation introduced by TALE nuclease pair POT32_T03 within a POT32 allele
gcaagcttgtgcaatagtagtagtaccactctcaaaactccttttacttcttcctccacttctttatcttccactcctaagccctctcaacttttcctccatggaaaacgtaacaaaacgttcaaagtttcatgcaaggttaccaataataacggtgaccaaaacgttgaaacgaattctgttgatcgaagaaatgttcttcttggcttaggtggtctttatggtgttgctaatgctataccattagctgcatccgctactccagctccacctcctgatctctcatcttgtagtaaagcaaagattaatgaaactacggaggtgccatacagttgttgcgctcccacgccaaagatatgaagaaagttccatattacaagttcccttctatgactaagctccgtattcgtcccctgctctgaggagtatattgccaagtacaatttggcggttagcaagatgaggggatcttgataagacacaacc

SEQ ID NO: 885 - DNA, 501 bp, Artificial
  Mutation introduced by TALE nuclease pair POT32_T03 within a POT32 allele
gcaagcttgtgcaatagtagtagtacatctctcaaaactccttttacttcttcctccacttctttatcttccactcctaagcccctctcaacttttcctccatggaaaacgtaacaaaacgttcaaagtttcatgcaaggttaccaataataacggtgaccaaaacgttgaaacgaattctgttgatcgaagaaatgttcttcttggcttaggtggtctttatggtgttgctaatgctataccattagctgcatccgctactccagctccacctcctgatctctcatcttgtagtaaagcaaagattaatgaaactacggaggtgccatacagttgttgcgctcccacgcctaaagatatgaagaaagttccatattacaagttcccttctatgactaagctccgtattcgtcccctgctcaaatgaggagtatattgccaagtacaatctggcgattagtcgaatgaaagatcttgataagacacaacctttaaacccta

SEQ ID NO: 886 - DNA, 465 bp, Artificial
  Mutation introduced by TALE nuclease pair POT32_T03 within a POT32 allele
gcaagcttgtgcaatagtagtagtacatctctcaaaactccttttacttcttcctccacttctttatcttccactcctaagccctctcaacttttcatccatggaaaacgtaaccaaatgttcaaagtttcatgcaaggttaccaataataacggtgaccaaaaccaaaacgttgaaacaattctgttgatcgaagaaatgttcttcttggcttaggtggtctttatggtgttgctaatgctataccattagctgcatccgctgctccagctccacctcctgatctctcgtcttgtagtatagccaggattaacgaaaatcaggtggtgccgtacagttgttgcgcgcctaagcctgatgatatggagaaagttccgtattacaagttcccttctatgactaagctccgtgttcgtcagcctgctctagatagaggagtatattgccaagtacaattgcgttgcg

SEQ ID NO: 887 - DNA, 517 bp, Artificial
  Mutation introduced by TALE nuclease pair POT32_T03 within a POT32 allele
gcaagcttgtgcaatagtagtagtacatctctcaaaactccttttacttcttcctccacttctttaacttccactcctaagcccctctcaacttttcatccatggaaaacgtaaccaaatgttcaaagtttcatgcaaggttaccaataataacggtgaccaaaaccaaaacgttgaaacgaattctgttgatcgaagaaatgttcttcttggcttaggtggtctttatggtgttgctaatgctataccattagctgcatccgctgctccagctccacctcctgatctctcgtcttgtagtatagccaggattaacgaaaatcaggtggtgccgtacagttgttgcgcgcctaagcctgatgatatggagaaagttccgtattacaagttcccttctatgactaagctccgtgttcgtcagcctgctcagctaatgaggagtatattgccaagtacaatctggcgattagtcgaatgaaagatcttgataagacacaacctttaaaccctattggtt

SEQ ID NO: 888 - DNA, 497 bp, Artificial
  Mutation introduced by TALE nuclease pair POT32_T03 within a POT32 allele
gcaagcttgtgcaatagtattagtacatctctcaaaactccttttacttcttcctccacttctttatcttccactcctaagccctctcaacttttcatccatggaaaacgtaaccaaatgttcaaagtttcatgcaaggttatcaataataacggtgaccaaaacgttgaaacgaattctgttgatcgaagaaatgttcttcttggcttaggtggtctttatggtgttgctaatgctataccattagctgcatccgctactccagctccacctcctgatctctcatcttgtagtaaagcaaagattatgaaactacggaggtgccatacagttgttgcgctcccacgccaaaagatatgaagaaagttccatattacaagttcccttctatgactaagctccgtattcgtcccctgctcatgaggagtatattgccaagtacaatttggcggttagcaagatgagggatcttgataagacacaacctttaaacccta

SEQ ID NO: 889 - DNA, 475 bp, Artificial
  Mutation introduced by TALE nuclease pair POT32_T03 within a POT32 allele
gcaagcttgtgcaatagttgtagtacatctctcaaaactccttttacttcttcctccacttctttaacttccactcctaaaccctctcaacttttcatccatggaaaacgtaaccaaatgttcaaagtttcatgcaaggttaccaataataacggtgaccaaaaccaaaacgttgaaacgaattctgttgatcgaagaaatgttcttcttggcttaggtggtctttatggtgttgctaatgctataccattagctgcatccgctactccatctccacctcctgatctctcgtcttgtagtatagccaggattaacgaaactcatgtggtgccgtacagttgttgcgcgcctaagcctgatgatatggagaaagttccgtattacaagttcccttctatgactaagctccgtgttcgtcagcctgctcataatgaggagtatattgccaagtacaatttggcggttagcaagatga

SEQ ID NO: 890 - DNA, 446 bp, Artificial
  Mutation introduced by TALE nuclease pair POT32_T03 within a POT32 allele
gcaagcttgtgcaatagtagtagtacatctctcaaaactccttttacttcttcctccacttctttaacttccactcctaagccctctcaacttttcatccatggaaaacgtaaccaaatgttcaaagtttcatgcaaggttaccaataataacggtgaccaaaaccaaaacgttgaaacaaattctgttgatcgaagaaatgttcttcttggcttaggtggtctttatggtgttgctaatgctataccattagctgcatccgctgctccagctccacctcctgatctctcgtcttgtagtatagccaggattaacgaaactcatgtggtgccgtacagttgttgcgcgcctaagcctgatgatatggagaaagttccgtagtacaattttggcggttagcaagatgagggatcttgataagacacaacctttaaaccctattggtt

SEQ ID NO: 891 - DNA, 464 bp, Artificial
  Mutation introduced by TALE nuclease pair POT32_T03 within a POT32 allele
gcaagcttgtgcaatagtagtagtacatctctcaaaactccttttacttcttcctccacttctttatcttccactcctaagcccctctcaacttttcatccatggaaaacgtaaccaaatgttcaaagtttcatgcaaggttaccaataataacggtgaccaaaaccaaaacgttgaaacaattctgttgatcgaagaaatgttcttcttggcttaggtggtctttatggtgttgctaatgctataccattagctgcatccgctgctccagctccacctcctgatctctcgtcttgtagtatagccaggattaacgaaaatcaggtggtgccgtacagttgttgcgcgcctaagcctgatgatatggagaaagttccgtattacaagttcccttctatgactaagctccgtgttcgtcagcctgctctagatagaggagtatattgccaagtacaattgcgttg

SEQ ID NO: 892 - DNA, 467 bp, Artificial
  Mutation introduced by TALE nuclease pair POT32_T03 within a POT32 allele
gcaagcttgtgcaatagtgtagtacatctctcaaaactccttttacttcttcctccacttctttaacttccactcctaaccgcctctcaacttttcatccatggaaaacgtaaccaaatgttcaaagtttcatgcaaggttaccaataataacggtgaccaaaaccaaaacgttgaaacgaattctgttgatcgaagaaatgttcttcttggcttaggtggtctttatggtgttgctaatgctataccattagctgcatccgctgctccagctccacctcctgatctctcgtcttgtagtatagccaggattaacgaaaatcaggtggtgccgtacagttgttgcgcgcctaagcctgatgatatggagaaagttccgtattacaagttcccttctatgactaagctccgtgttcgtcagcctgctcatagatagaggagtatattgccaagtacaattgcgttgcg

SEQ ID NO: 893 - DNA, 510 bp, Artificial
  Mutation introduced by TALE nuclease pair POT32_T03 within a POT32 allele
gcaagcttgtgcaatagtagtagtacatctctcaaaactccttttacttcttcctccacttctttaacttccactcctaagcccctctcaacttttcatccatggaaaacgtaaccaaatgttcaaagtttcatgcatggttaccaataataacggtgaccaaaacgttgaaacgaattctgttgatcgaagaaatgttcttcttggcttaggtggtctttatggtgttgctaatgctataccattagctgcatccgctgctccaactccacctcctgatctctcgtcttgtagtatagccaggattaacgaaaatcaggtggtgccgtacagttgttgcgcgcctaagcctgatgatatggagaaagttccgtattacaagttcccttctatgactaagctccgtgttcgtcagcctgctcactaatgaggagtatattgccaagtacaatctggcgattagtcgaatgagagatcttgataagacacaacctttaaaccctattggtt

SEQ ID NO: 894 - DNA, 515 bp, Artificial
  Mutation introduced by TALE nuclease pair POT32_T03 within a POT32 allele
gcaagcttgtgcaatagtagtagtacatctctcaaaactccttttacttcttcctccacttctttatcttccactcctaagcccctctcaacttttcatccatggaaaacgtaaccaaatgttcaaagtttcatgcaaggttaccaataataacggtgaccaaaaccaaaacgttgaaacgaattctgttgatcgaagaaatgttcttcttggcttaggtggtctttatggtgttgctaatgctataccattagctgcatccgctgctccagctccacctcctgatctctcgtcttgtagtatagccaggattaacgaaaatcaggtggtgccgtacagttgttgcgcgcctaagcctgatgatatggagaaagttccgtattacaagttcccttctatgactaagctccgtgttcgtcagcctcagctaatgaggagtatattgccaagtacaatttggcggttagcaagatgaggggatcttgataagacacaacctttaaaccctattggtt

SEQ ID NO: 895 - DNA, 517 bp, Artificial
  Mutation introduced by TALE nuclease pair POT32_T03 within a POT32 allele
  misc_feature (152); (155): n is a or c or t or g
gcaagcttgtgcaatagtgtagtacatctctcaaaactccttttacttcttcctccacttctttaacttccactcctaaaccgcctctcaacttttcatccatggaaaacgtaaccaaatgttcaaagtttcatgcagttgctatcaataanagngcgaaccaaaaccaacgttgaaacgaattctgttgatcgaagaaatgttcttcttggcttaggtggtctttatggtgttgctaatgctataccattagctgcatccgctactccatgtccacctcctgatctctcgtcttgtagtatagccaggattaacgaaaactcaggtggtgccgtacagttgttgcgcgcctaagcctgatgatatggagaaagttccgtattacaagttcccttctatgactaagctccgtgttcgtcagcctgctcataatgagggagtatattgccaagtacaatttggcggttagcaagatgaggggatcttgataagacacaacctttaaaccctattggtt

SEQ ID NO: 896 - DNA, 494 bp, Artificial
  Mutation introduced by TALE nuclease pair POT32_T03 within a POT32 allele
gcaagcttgtgcaatagtagtagtacatctctcaaaactccttttacttcttcctccacttctttatcttccactcctaagcccctctcaacttttcatccatggaaaacgtaaccaaatgttcaaagtttcatgcaaggttaccaataataacggtgaccaaaaccaaaacgttgaaacgaattctgttgatcgaagaaatgttcttcttggcttaggtggtctttatggtgttgctaatgctataccattagctgcatccgctgctccagctccacctcctgatctctcgtcttgtagtatagccaggattaacgaaaatcaggtggtgccgtacagttgttgcgcgcctaagcctgatgatatggagaaagttccgtattacaagttcccttctatgactaagctccgtgttcgtcagcctgctcaatgaggagtatattgccaagtacaatttggcggttagcaagatgagggatcttgataagacacaa

SEQ ID NO: 897 - DNA, 505 bp, Artificial
  Mutation introduced by TALE nuclease pair POT32_T03 within a POT32 allele
gcaagcttgtgcaatagtagtagtacatccctcaaacatccttttacttcttcctccacttctttaacttccactcctaaaccctctcaacttttcatccatggaaaacgtaaccaaatgttcaaagtttcatgcatggttaccaataataacggtgaccaaaaccaaaacgttgaaacgaattctgttgatcgaagaaatgttcttcttggcttaggtggtctttatggtgttgctaatgctataccattagctgcatccgctgctccagctccacctcctgatctctcgccttgtagtatagccaggattaacgaaaatcaggtggtgccgtacagttgttgcgcgcctaagcctgatgatatggagaaagttccgtattacaagttcccttctatgactaagctccgtgttcgtcagcctgctaatgaggagtatattgccaagtacaatctggcgattagtcgaatgaaagatcttgataagacacaacctttaaacccta

SEQ ID NO: 898 - DNA, 513 bp, Artificial
  Mutation introduced by TALE nuclease pair POT32_T03 within a POT32 allele
gcaagcttgtgcaatagttgtagtacatctctcaaaactccttttacttcttcctccacttctttaacttccactcctaaaccctctcaacttttcatccatggaaaacgtaaccaaatgttcaaagtttcatgcaaggttaccaataataacggtgaccaaaaccaaaacgttgaaacaaattctgttgatcgaagaaatgttcttcttggcttaggtggtctttatggtgttgctaatgctataccattagctgcatccgctgctccagctccacctcctgatctctcgtcttgtagtatagccaggattaacgaaaatcaggtggtgccgtacagttgttgcgcgcctaagcctgatgatatggagaaagttccgtattacaagttcccttctatgactaagctccgtgttcgtcagcctgctctaatgaggagtatattgccaagtacaatctggcgattagtcgaatgaaagatcttgataagacacaacctttaaaccctattggtt

SEQ ID NO: 899 - DNA, 515 bp, Artificial
  Mutation introduced by TALE nuclease pair POT32_T03 within a POT32 allele
gcaagcttgtgcaaatagtagtagtacatctcatcaaactccttttacttcttcctccacttctttaacttccactcctaagcccctctcaacttttcatccatggaaaacgtaaccaaatgttcaaagtttcatgcaaggttaccaataataacggtgaccaaaaccaaaacgttgaaacgaattctgttgatcgaagaaatgttcttcttggcttaggtggtctttatggtgttgctaatgctataccattagctgcatccgctgctccagctccacctcctgatctctcgtcttgtagtatagccaggattaacgaaaatcaggtggtgccgtacagttgttgcgcgcctaagcctgatgatatggagaaagttccgtattacaagttcccttctatgactaagctccgtgttcgtcagcctgctctaatgaggagtatattgccaagtacaatctggcgattagtcgaatgaaagatcttgataagacacaacctttaaaccctattggtt

SEQ ID NO: 900 - DNA, 507 bp, Artificial
  Mutation introduced by TALE nuclease pair POT32_T03 within a POT32 allele
gcaagcttgtgcaatagtattagtacatctctcaaaactccttttacttcttcctccacttctttatcttccactcctaagcccctctcaacttttcatccatggaaaacgtaaccaaatgttcaaagtttcatgcaaggttaccaataataacggtgaccaaaaccaaaacgttgaaacgaattctgttgatcgaagaaatgttcttcttggcttaggtggtctttatggtgttgctaatgctataccattagctgcatccgctgctccagctccacctcctgatctctcgtcttgtagtatagccaggattaacgaaaatcaggtggtgccgtacagttgttgcgcgcctaagcctgatgatatggagaaagttccgtattacaagttcccttctatgactaagctccgtgttcgtcagcctgcttaatgaggagtatattgccaagtacaatttggcggttagcaagatgagggatcttgataagacacaacctttaaacccta

SEQ ID NO: 901 - DNA, 428 bp, Artificial
  Mutation introduced by TALE nuclease pair POT32_T03 within a POT32 allele
gcaagcttgtgcaatagtagtagtacatctctcaaaactccttttacttcttcctccacttctttatcttccactcctaagccctctcaacttttcatccatggaaaacgtaaccaaatgttcaaagtttcatgcaaggttaccaataataacggtgaccaaaaccaaaacgttgaaacaaattctgttgatcgaagaaatgttcttcttggcttaggtggtctttatggtgttgctaatgctataccattagctgcatccgctactccatctccacctcctgatctctcgtcttgtagtatagccaggattaacgaaactcatgtggtgccgtacagttgttgcgcgcctaagcctgatgatatggagaaagtttggcggttagcaagatgagggatcttgataagacacaacctttaaaccctatt

SEQ ID NO: 902 - DNA, 511 bp, Artificial
  Mutation introduced by TALE nuclease pair POT32_T03 within a POT32 allele
gcaagcttgtgcaatagtagtagtacatctctcaaaactccttttacttcttcctccacttctttatcttccactcctaagcccctctcaacttttcatccatggaaaacgtaaccaaatgttcaaagtttcatgcaaggttatcaataataacggtgaccaaaacgttgaaacgaattctgttgatcgaagaaatgttcttcttggcttaggtggtctttatggtgttgctaatgctataccattagctgcatccgctgctccaactccacctcctgatctctcgtcttgtagtatagccaggattaacgaaaatcaggtggtgccgtacagttgttgcgcgcctaagcctgatgatatggagaaagttccgtattacaagttcccttctatgactaagctccgtgttcgtcagcctgctcatctaatgaggagtatattgccaagtacaatctggcgattagtcgaatgagagatcttgataagacacaacctttaaaccctattggtt

SEQ ID NO: 903 - DNA, 516 bp, Artificial
  Mutation introduced by TALE nuclease pair POT32_T03 within a POT32 allele
  misc_feature (429): n is a or c or t or g
gcaagcttgtgcaatagtagtagtacatctctcaaaactccttttacttcttcctccacttctttaacttccactcctaagccctctcaacttttcatccatggaaaacgtaaccaaatgttcaaagtttcatgcaaggttaccaataataacggtgaccaaaaccaaaacgttgaaacgaattctgttgatcgaagaaatgttcttcttggcttaggtggtctttatggtgttgctaatgctataccattagctgcatccgctgctccagctccacctcctgatctctcgtcttgtagtatagccaggattaacgaaaatcaggtggtgccgtacagttgttgcgcgcctaagcctgatgatatggagaaagttccgtattacaagttcccttctatgactaagctccgtgttcgtcagcctgctcanataatgaggagtatattgccaagtacaatctggcgattagtcgaatgaaagatcttgataagacacaacctttaaaccctattggtt

SEQ ID NO: 904 - DNA, 452 bp, Artificial
  Mutation introduced by TALE nuclease pair POT32_T03 within a POT32 allele
  misc_feature (269): n is a or c or t or g
gcaagcttgtgcaatagtagtagtacatctctcaaaactccttttacttcttcctccacttctttatcttccactcctaagccctctcaacttttcatccatggaaaacgtaaccaaatgttcaaagtttcatgcaaggttactataataatagcggcgaaccaaaacgttgaaacgaaattctgttgatcgaagaaatgttcttcttggcttaggtggtctttatggtgttgctaatgctataccattagctgcatccgctgctccantccacctcctgatctctcgtcttgtagtatagccaggattaacgaaaatcaggtggtgccgtacagttgttgcgcgcctaagcctgatgatatggagaaagttccgtattacagttcccttctatgactaagctccgtgttcgtcagcctgctcatgataatgaggagtatattgccaagtac

SEQ ID NO: 905 - DNA, 515 bp, Artificial
  Mutation introduced by TALE nuclease pair POT32_T03 within a POT32 allele
gcaagcttagtgcaatagtagtagtacatccctcaaaactccttttacttcttcctccacttctttaacttccactcctaaaccctctcaacttttcatccatggaaaacgtaaccaaatgttcaaagtttcatgcatggttaccaataataacggtgaccaaaaccaaaacgttgaaacgaattctgttgatcgaagaaatgttcttcttggcttaggtggtctttatggtgttgctaatgctataccattagctgcatccgctactccatctccacctcctgatctctcgtcttgtagtatagccaggattaacgaaactcatgtggtgccgtacagttgttgcgcgcctaagcctgatgatatggagaaagttccgtattacaagttcccttctatgactaagctccgtgttcgtcagcctgctcataatgaggagtatattgccaagtacaatctggcgattagtcgaatgaaagatcttgataagacacaacctttaaaccctattggtt

SEQ ID NO: 906 - DNA, 455 bp, Artificial
  Mutation introduced by TALE nuclease pair POT32_T03 within a POT32 allele
gcaagcttgtgcaatagttgtagtacatctctcaaaactccttttacttcttcctccacttctttaacttccactcctaacgcctctcaacttttcatccatggaaaacgtaaccaaatgttcaaagtttcatgcaaggttaccaataataacggtgaccaaaaccaaaacgttgaaacaaattctgttgatcgaagaaatgttcttcttggcttaggtggtctttatggtgttgctaatgctataccattagctgcatccgctgctccagctccacctcctgatctctcgtcttgtagtatagccaggattaacgaaaatcaggtggtgccgtacagttgttgcgcgcctaagcctgatgatatggagaaagttccgtattacaagttcccttctatgactaagctccgtgttcgtcagcctgcgcataatgaggagtatattgccaagtacaa

SEQ ID NO: 907 - DNA, 479 bp, Artificial
  Mutation introduced by TALE nuclease pair POT32_T03 within a POT32 allele
gcaagcttgtgcaatagttgtagtacatccctcaaacatccttttacttcttcctccacttctttaacttccactcctaaaccctctcaacttttcatccatggaaaacgtaaccaaatgttcaaagtttcatgcatggttaccaataataacggtgaccaaaaccaaaacgttgaaacgaattctgttgatcgaagaaatgttcttcttggcttaggtggtctttatggtgttgctaatgctataccattagctgcatccgctactccatctccacctcctgatctctcgtcttgtagtatagccaggattaacgaaactcatgtggtgccgtacagttgttgcgcgcctaagcctgatgatatggagaaagttccgtattacaagttcccttctatgactaagctccgtgttcgtcagcctgctcacaagtacaatctggcgattagtcgaatgaaagatcttgataagacacaacc

SEQ ID NO: 908 - DNA, 461 bp, Artificial
  Mutation introduced by TALE nuclease pair POT32_T03 within a POT32 allele
gcaagcttgtgcaatagttgtagtacatccctcaaaactccttttacttcttcctccacttctttaacttccactcctaaaccctctcaacttttcatccatggaaaacgtaaccaaatgttcaaagtttcatgcatggttaccaataataacggtgaccaaaaccaaaacgttgaaacgaattctgttgatcgaagaaatgttcttcttggcttaggtggtctttatggtgttgctaatgctataccattagctgcatccgctactccatctccacctcctgatctctcgtcttgtagtatagccaggattaacgaaactcatgtggtgccgtacagttgttgcgcgcctaagcctgatgatatggagaaagttccgtattacaagttcccttctatgactaagctccgtgttcgtcagcctgctcataatagaggagtatattgccaagtacaattgcg

SEQ ID NO: 909 - DNA, 500 bp, Artificial
  Mutation introduced by TALE nuclease pair POT32_T03 within a POT32 allele
gcaagcttgtgcaatagtagtagtacatctctcaaaactccttttacttcttcctccacttctttaacttccactcctaagccctctcaacttttcatccatggaaaacgtaaccaaatgttcaaagtttcatgcaaggttaccaataataacggtgaccaaaaccaaaacgttgaaacgaattctgttgatcgaagaaatgttcttcttggcttaggtggtctttatggtgttgctaatgctataccattagctgcatccgctgctccagctccacctcctgatctctcgtcttgtagtatagccaggattaacgaaaatcaggtggtgccgtacagttgttgcgcgcctaagcctgatgatatggagaaagttccgtattacaagttcccttctatgactaagctccgtgttcgtcagcctgctcataatgaggagtatattgccaagtacaatttggcggttagcaagatgagggatcttgataagacacaaccttt

SEQ ID NO: 910 - DNA, 512 bp, Artificial
  Mutation introduced by TALE nuclease pair POT32_T03 within a POT32 allele
gcaagcttgtgcaatagtagtagtacatctctcaaaactccttttacttcttcctccacttctttatcttccactcctaagcccctctcaacttttcatccatggaaaacgtaaccaaatgttcaaagtttcatgcaaggttaccaataataacggtgaccaaaaccaaaacgttgaaacaattctgttgatcgaagaaatgttcttcttggcttaggtggtctttatggtgttgctaatgctataccattagctgcatccgctgctccagctccacctcctgatctctcgtcttgtagtatagccaggattaacgaaaatcaggtggtgccgtacagttgttgcgcgcctaagcctgatgatatggagaaagttccgtattacaagttcccttctatgactaagctccgtgttcgtcagcctgctcatcgataatgaggagtatattgccaagtacaatctggcgattagtcgaatgaaagatcttgataagacacaacctttaaacccta

SEQ ID NO: 911 - DNA, 504 bp, Artificial
  Mutation introduced by TALE nuclease pair POT32_T03 within a POT32 allele
gcaagcttgtgcaatagttgtagtacatccctcaacatccttttacttcttcctccacttctttaacttccactcctaaaccctctcaacttttcatccatggaaaacgtaaccaaatgttcaaagtttcatgcatggttaccaataataacggtgaccaaaaccaaaacgttgaaacgaattctgttgatcgaagaaatgttcttcttggcttaggtggtctttatggtgttgctaatgctataccattagctgcatccgctactccatctccacctcctgatctctcgtcttgtagtatagccaggattaacgaaactcatgtggtgccgtacagttgttgcgcgcctaagcctgatgatatggagaaagttccgtattacaagttcccttctatgactaagctccgtgttcgtcagcctgctaatgaggagtatattgccaagtacaatttggcggttagcaagatgagggatcttgataagacacaacctttaaacccta

SEQ ID NO: 912 - DNA, 483 bp, Artificial
  Mutation introduced by TALE nuclease pair POT32_T03 within a POT32 allele
gcaagcttgtgcaatagtagtagtacatctctcaaaactccttttacttcttcctccacttctttaacttccactcctaagccctctcaacttttcatccatggaaaacgtaaccaaatgttcaaagtttcatgcaaggttaccaataataacggtgaccaaaaccaaaacgttgaaacgaattctgttgatcgaagaaatgttcttcttggcttaggtggtctttatggtgttgctaatgctataccattagctgcatccgctgctccagctccacctcctgatctctcgtcttgtagtatagccaggattaacgaaaatcaggtggtgcccgtacagttgttgcgcgcctaagcctgatgatatggagaaagttccgtattacaagttcccttctatgactaagctccgtgttcgtcagcctgctgccaagtacaatctggcgattagtcgaatgaaagatcttgataagacacaaccttt

SEQ ID NO: 913 - DNA, 493 bp, Artificial
  Mutation introduced by TALE nuclease pair POT32_T03 within a POT32 allele
gcaagcttgtgcaatagtagtagtacatctctcaaaactccttttacttcttcctccacttctttaacttccactcctaagccctctcaacttttcatccatggaaaacgtaaccaaatgttcaaagtttcatgcaaggttaccaataataacggtgaccaaaaccaaaacgttgaaacgaattctgttgatcgaagaaatgttcttcttggcttaggtggtctttatggtgttgctaatgctataccattagctgcatccgctgctccagctccacctcctgatctctcgtcttgtagtatagccaggattaacgaaaatcaggtggtgccgtacagttgttgcgcgcctaagcctgatgatatggagaaagttccgtattacaagttcccttctatgactaagctccgtgttcgtcagcctgctcatgaggagtatattgccaagtacaatttggcggttagcaagatgaggggatcttgataagacacaa

SEQ ID NO: 914 - DNA, 497 bp, Artificial
  Mutation introduced by TALE nuclease pair POT32_T03 within a POT32 allele
gcaagcttgtgcaatagtagtagtacatctctcaaaactccttttacttcttcctccacttctttaacttccactcctaagccctctcaacttttcatccatggaaaacgtaaccaaatgttcaaagtttcatgcaaggttaccaataataacggtgaccaaaaccaaaacgttgaaacgaattctgttgatcgaagaaatgttcttcttggcttaggtggtctttatggtgttgctaatgctataccattagctgcatccgctgctccagctccacctcctgatctctcgtcttgtagtatagccaggattaacgaaaatcaggtggtgccgtacagttgttgcgcgcctaagcctgatgatatggagaaagttccatattacaagttcccttctatgactaagctccgtattcgtccccctgctaatgaggagtatattgccaagtacaatttggcggttagcaagatgagggatcttgataagacacaaccttt

SEQ ID NO: 915 - DNA, 513 bp, Artificial
  Mutation introduced by TALE nuclease pair POT32_T03 within a POT32 allele
gcaagcttgtgcaatagtagtagtacatctctcaaaactccttttacttcttcctccacttctttatcttccactcctaagcccctctcaactttttcatccatggaaaacgtaaccaaatgttcaaagtttcatgcaaggttatcaataataacggtgaccaaaacgttgaaacgaattctgttgatcgaagaaatgttcttcttggcttaggtggtctttatggtgttgctaatgctataccattagctgcatccgctgctccaactccacctcctgatctctcgtcttgtagtatagccaggattaacgaaaatcaggtggtgccgtacagttgttgcgcgcctaagcctgatgatatggagaaagttccgtattacaagttcccttctatgactaagctccgtgttcgtcagcctgctcaagctaatgaggagtatattgccaagtacaatctggcgattagtcgaatgaaagatcttgataagacacaacctttaaaccctattggtt

SEQ ID NO: 916 - DNA, 512 bp, Artificial
  Mutation introduced by TALE nuclease pair POT32_T03 within a POT32 allele
  misc_feature (424): n is a or c or t or g
gcaagcttgtgcaatagtagtagtacatctctcaaaactccttttacttcttcctccacttctttatcttccactcctaagcccctctcaacttttcatccatggaaaacgtaaccaaatgttcaaagtttcatgcaaggttatcaataataacggtgaccaaaacgttgaaacgaattctgttgatcgaagaaatgttcttcttggcttaggtggtctttatggtgttgctaatgctataccattagctgcatccgctgctccaactccacctcctgatctctcgtcttgtagtatagccaggattaacgaaaatcaggtggtgccgtacagttgttgcgcgcctaagcctgatgatatggagaaagttccgtattacaagttcccttctatgactaagctccgtgttcgtcagcctgctcangataatgaggagtatattgccaagtacaatctggcgattagtcgaatgagagatcttgataagacacaacctttaaaccctattggtt

SEQ ID NO: 917 - DNA, 498 bp, Artificial
  Mutation introduced by TALE nuclease pair POT32_T03 within a POT32 allele
gcaagcttgtgcaatagtattagtacatctctcaaaactccttttacttcttcctccacttctttatcttccactcctaagccctctcaacttttcatccatggaaaacgtaaccaaatgttcaaagtttcatgcaaggttatcaataataacggtgaccaaaacgttgaaacgaattctgttgatcgaagaaatgttcttcttggcttaggtggtctttatggtgttgctaatgctataccattagctgcatccgctactccagctccacctcctgatctctcatcttgtagtaaagcaaagattaatgaaactacggaggtgccatacagttgttgcgctcccacgccaaaagatatgaagaaagttccatattacaagttcccttctatgactaagctccgtattcgtcccctgctcatgaggagtatattgccaagtacaatttggcggttagcaagatgagggatcttgataagacacaacctttaaacccta

SEQ ID NO: 918 - DNA, 506 bp, Artificial
  Mutation introduced by TALE nuclease pair POT32_T03 within a POT32 allele
gcaagcttgtgcaatagtagtagtacatctctcaaaactccttttacttcttcctccacttctttaacttccactcctaagcccctctcaacttttcatccatggaaaacgtaaccaaatgttcaaagtttcatgcaaggttaccaataataacggtgaccaaaaccaaaacgttgaaacgaattctgttgatcgaagaaatgttcttcttggcttaggtggtctttatggtgttgctaatgctataccattagctgcatccgctgctccagctccacctcctgatctctcgtcttgtagtatagccaggattaacgaaaatcaggtggtgccgtacagttgttgcgcgcctaagcctgatgatatggagaaagttccgtattacaagttcccttctatgactaagctccgtgttcgtcagcctgctcatgaggagtatattgccaagtacaatctggcgattagtcgaatgaaagatcttgataagacacaacctttaaacccta

SEQ ID NO: 919 - DNA, 514 bp, Artificial
  Mutation introduced by TALE nuclease pair POT32_T03 within a POT32 allele
gcaagcttgtgcaatagtagtagtacatctctcaaaactccttttacttcttcctccacttctttaacttccactcctaagcccctctcaacttttcatccatggaaaacgtaaccaaatgttcaaagtttcatgcaaggttaccaataataacggtgaccaaaaccaaaacgttgaaacgaattctgttgatcgaagaaatgttcttcttggcttaggtggtctttatggtgttgctaatgctataccattagctgcatccgctgctccagctccacctcctgatctctcgtcttgtagtatagccaggattaacgaaaatcaggtggtgccgtacagttgttgcgcgcctaagcctgatgatatggagaaagttccgtattacaagttcccttctatgactaagctccgtgttcgtcagcctgctataatgaggagtatattgccaagtacaatctggcgattagtcgaatgaaagatcttgataagacacaacctttaaaccctattggtt

SEQ ID NO: 920 - DNA, 475 bp, Artificial
  Mutation introduced by TALE nuclease pair POT32_T03 within a POT32 allele
gcaagcttgtgcaatagtagtagtacatctctcaaaactccttttacttcttcctccacttctttatcttccactcctaagcccctctcaacttttcatccatggaaaacgtaaccaaatgttcaaagtttcatgcaaggttaccaataataacggtgaccaaaaccaaaacgttgaaacaaattctgttgatcgaagaaatgttcttcttggcttaggtggtctttatggtgttgctaatgctataccattagctgcatccgctgctccagctccacctcctgatctctcgtcttgtagtatagccaggattaacgaaaatcaggtggtgccgtacagttgttgcgcgcctaagcctgatgatatggagaaagttccgtattacaagttcccttctatgactaagctcaagtacaatttggcggttagcaagatgaggggatcttgataagacacaacctttaaaccctattgg

SEQ ID NO: 921 - DNA, 516 bp, Artificial
  Mutation introduced by TALE nuclease pair POT32_T03 within a POT32 allele
gcaagcttgtgcaatagttgtagtacatctctcaaaactccttttacttcttcctccacttctttaacttccactcctaaaccctctcaacttttcatccatggaaaacgtaaccaaatgttcaaagtttcatgcaaggttaccaataataacggtgaccaaaaccaaaacgttgaaacgaattctgttgatcgaagaaatgttcttcttggcttaggtggtctttatggtgttgctaatgctataccattagctgcatccgctgctccagctccacctcctgatctctcgtcttgtagtatagccaggattaacgaaaatcaggtggtgccgtacagttgttgcgcgcctaagcctgatgatatggagaaagttccgtattacaagttcccttctatgactaagctccgtgttcgtcagcctgctcactaatgaggagtatattgccaagtacaatttggcggttagcaagatgagggatcttgataagacacaaccttttaaaccctattggtt

SEQ ID NO: 922 - DNA, 502 bp, Artificial
  Mutation introduced by TALE nuclease pair POT32_T03 within a POT32 allele
gcaagcttgtgcaatagtagtagtacatctctcaaaactccttttacttcttcctccacttctttatcttccactcctaagcccctctcaacttttcatccatggaaaacgtaaccaaatgttcaaagtttcatgcaaggttatcaataataacggtgaccaaaacgttgaaacgaattctgttgatcgaagaaatgttcttcttggcttaggtggtctttatggtgttgctaatgctataccattagctgcatccgctgctccaactccacctcctgatctctcgtcttgtagtatagccaggattaacgaaaatcaggtggtgccgtacagttgttgcgcgcctaagcctgatgatatggagaaagttccgtattacaagttcccttctatgactaagctccgtgttcgtcagcctgctcaaatgaggagtatattgccaagtacaatctggcgattagtcgaatgagagatcttgataagacacaacctttaaacccta

SEQ ID NO: 923 - DNA, 481 bp, Artificial
  Mutation introduced by TALE nuclease pair POT32_T03 within a POT32 allele
gcaagcttgtgcaatagtagtagtacatctctcaaaactccttttacttcttcctccacttctttatcttccactcctaagccctctcaacttttcatccatggaaaacgtaaccaaatgttcaaagtttcatgcaaggttaccaataataacggtgaccaaaaccaaaacgttgaaacgaattctgttgatcgaagaaatgttcttcttggcttaggtggtctttatggtgttgctaatgctataccattagctgcatccgctgctccagctccacctcctgatctctcgtcttgtagtatagccaggattaacgaaaatcaggtggtgccgtacagttgttgcgcgcctaagcctgatgatatggagaaagttccgtattacaagttcccttctatgactaagctccgtgttcgtcagccgagtatattgccaagtacaatttggcggttagcaagatgaggggatcttgataagacac

SEQ ID NO: 924 - DNA, 476 bp, Artificial
  Mutation introduced by TALE nuclease pair POT32_T03 within a POT32 allele
gcaagcttgtgcaatagtagtagtacatctctcaaaactccttttacttcttcctccacttctttatcttccactcctaagcccctctcaacttttcatccatggaaaacgtaaccaaatgttcaaagtttcatgcatggttaccaataataacggtgaccaaaaccaaaacgttgaaacgaattctgttgatcgaagaaatgttcttcttggcttaggtggtctttatggtgttgctaatgctataccattagctgcatccgctactccatctccacctcctgatctctcgtcttgtagtatagccaggattaacgaaactcatgtggtgccgtacagttgttgcgcgcctaagcctgatgatatggagaaagttccgtattacaagttcccttctatgactaagctccgtgttcgtcagcctgaagctaatgaggagtatattgccaagtacaatttggcggttagcaagatga

SEQ ID NO: 925 - DNA, 500 bp, Artificial
  Mutation introduced by TALE nuclease pair POT32_T03 within a POT32 allele
gcaagcttgtgcaatagtagtagtacatctctcaaaactccttttacttcttcctccacttctttaacttccactcctaagcccctctcaacttttcatccatggaaaacgtaaccaaatgttcaaagtttcatgcaaggttaccaataataacggtgaccaaaaccaaaacgttgaaacgaattctgttgatcgaagaaatgttcttcttggcttaggtggtctttatggtgttgctaatgctataccattagctgcatccgctgctccagctccacctcctgatctctcgtcttgtagtatagccaggattaacgaaaatcaggtggtgccgtacagttgttgcgcgcctaagcctgatgatatggagaaagttccgtattacaagttcccttctatgactaagctccgtgttcgtcagcctgctcatatattgccaagtacaatttggcggttagcaagatgaggggatcttgataagacacaacctttaaacccta

SEQ ID NO: 926 - DNA, 516 bp, Artificial
  Mutation introduced by TALE nuclease pair POT32_T03 within a POT32 allele
gcaagcttgtgcaatagtagtagtacatctctcaaaactccttttacttcttcctccacttctttaacttccactcctaagccctctcaacttttcatccatggaaaacgtaaccaaatgttcaaagtttcatgcaaggttaccaataataacggtgaccaaaaccaaaacgttgaaacgaattctgttgatcgaagaaatgttcttcttggcttaggtggtctttatggtgttgctaatgctataccattagccgcatccgctgctccagctccacctcctgatctctcgtcttgtagtatagccaggattaacgaaaatcaggtggtgccgtacagttgttgcgcgcctaagcctgatgatatggagaaagttccgtattacaagttcccttctatgactaagctccgtgttcgtcagcctgctcagctaatgaggagtatattgccaagtacaatctggcgatctgtcgaatgaaagatcttgataagacacaacctttaaaccctattggtt

SEQ ID NO: 927 - DNA, 515 bp, Artificial
  Mutation introduced by TALE nuclease pair POT32_T03 within a POT32 allele
gcaagcttgtgcaatagtagtagtacatctctcaaaactccttttacttcttcctccacttctttaacttccactcctaagccctctcaacttttcatccatggaaaacgtaaccaaatgttcaaagtttcatgcaaggttaccaataataacggtgaccaaaaccaaaacgttgaaacgaattctgttgatcgaagaaatgttcttcttggcttaggtggtctttatggtgttgctaatgctataccattagctgcatccgctgctccagctccacctcctgatctctcgtcttgtagtatagccaggattaacgaaaatcaggtggtgccgtacagttgttgcgcgcctaagcctgatgatatggagaaagttccgtattacaagttcccttctatgactaagctccgtgttcgtcagcctgctcactaatgaggagtatattgccaagtacaatttggcggttagcaagatgagggatcttgataagacacaacctttaaaccctattggtt

SEQ ID NO: 928 - DNA, 493 bp, Artificial
  Mutation introduced by TALE nuclease pair POT32_T03 within a POT32 allele
gcaagcttgtgcaatagtagtagtacatctctcaaaactccttttacttcttcctccacttctttatcttccactcctaagcccctctcaacttttcatccatggaaaacgtaaccaaatgttcaaagtttcatgcaaggttaccaataataacggtgaccaaaaccaaaacgttgaaacaaattctgttgatcgaagaaatgttcttcttggcttaggtggtctttatggtgttgctaatgctataccattagctgcatccgctgctccagctccacctcctgatctctcgtcttgtagtatagccaggattaacgaaaatcaggtggtgccgtacagttgttgcgcgcctaagcctgatgatatggagaaagttccgtattacaagttcccttctatgactaagctccgtgttcgtcagcctgctcatgaggagtatattgccaagtacaatctggcgattagtcgaatgaaagatcttgataagacacaa

SEQ ID NO: 929 - DNA, 496 bp, Artificial
  Mutation introduced by TALE nuclease pair POT32_T03 within a POT32 allele
gcaagcttgtgcaatagtagtagtacatccctcaaacatccttttacttcttcctccacttctttaacttccactcctaaaccctctcaacttttcatccatggaaaacgtaaccaaatgttcaaagtttcatgcatggttaccaataataacggtgaccaaaaccaaaacgttgaaacgaattctgttgatcgaagaaatgttcttcttggcttaggtggtctttatggtgttgctaatgctataccattagctgcatccgctactccatctccacctcctgatctctcgtcttgtagtatagccaggattaacgaaactcatgtggtgccgtacagttgttgcgcgcctaagcctgatgatatggagaaagttccgtattacaagttcccttctatgactaagctccgtgttcgtcagcctggtatattgccaagtacaatttggcggttagcaagatgaggggatcttgataagacacaacctttaaacccta

SEQ ID NO: 930 - DNA, 511 bp, Artificial
  Mutation introduced by TALE nuclease pair POT32_T03 within a POT32 allele
  misc_feature (424): n is a or c or t or g
gcaagcttgtgcaatagtagtagtacatctctcaaaaactccttttacttcttcctccacttctttatcttccactcctaagcccctctcaacttttcatccatggaaaacgtaaccaaatgttcaaagtttcatgcaaggttatcaataataacggtgaccaaaacgttgaaacgaattctgttgatcgaagaaatgttcttcttggcttaggtggtctttatggtgttgctaatgctataccattagctgcatccgctgctccaactccacctcctgatctctcgtcttgtagtatagcaggattaacgaaaatcaggtggtgccgtacagttgttgcgcgcctaagcctgatgatatggagaaagttccgtattacaagttcccttctatgactaagctccgtgttcgtcagcctgctcanataatgaggagtatattgccaagtacaatctggcgattagtcgaatgagagatcttgataagacacaacctttaaaccctattggtt

SEQ ID NO: 931 - DNA, 510 bp, Artificial
  Mutation introduced by TALE nuclease pair POT32_T03 within a POT32 allele
gcaagcttgtgcaatagtagtagtacatctctcaaaactccttttacttcttcctccacttctttatcttccactcctaagccctctcaacttttcatccatggaaaacgtaaccaaatgttcaaagtttcatgcaaggttaccaataataacggtgaccaaaaccaaaacgttgaaacaaaattctgttgatcgaagaaatgttcttcttggcttaggtggtctttatggtggttgctaatgctataccattagctgcatccgctgctccagctccacctcctgatctctcgtcttgtagtatagccaggattaacgaaaatcaggtggtgccgtacagttgttgcgcgcctaagcctgatgatatggagaaagttccgtattacaagttcccttctatgactaagctccgtgttcgtcagcctgctcaaatgaggagtatattgccaagtacaatttggcgggttagcaagatgaggggatcttgataagacacaaacccttttaaaa

SEQ ID NO: 932 - DNA, 486 bp, Artificial
  Mutation introduced by TALE nuclease pair POT32_T03 within a POT32 allele
gcaagcttgtgcaatagttgtagtacatccctcaaacatccttttacttcttcctccacttctttaacttccactcctaaaccctctcaacttttcatccatggaaaacgtaaccaaatgttcaaagtttcatgcatggttaccaataataacggtgaccaaaaccaaaacgttgaaacgaattctgttgatcgaagaaatgttcttcttggcttaggtggtctttatggtgttgctaatgctataccattagctgcatccgctactccatctccacctcctgatctctcgtcttgtagtatagccaggattaacgaaactcatgtggtgccgtacagttgttgcgcgcctaagcctgatgatatggagaaagttccgtattacaagttcccttctatgactaagctccgtgttcgtcagcctgctcaagctaatgaggagtatattgccaagtacaatttggcggttagcaagatgagggatctt

SEQ ID NO: 933 - DNA, 460 bp, Artificial
  Mutation introduced by TALE nuclease pair POT32_T03 within a POT32 allele
gcaagcttgtgcaatagtagtagtacatctctcaaaactccttttacttcttcctccacttctttacttccactcctaacgcctctcaacttttcatccatggaaaacgtaaccaaatgttcaaagtttcatgcaaggttaccaataataacggtgaccaaaaccaaaacgttgaaacaaattctgttgatcgaagaaatgttcttcttggcttaggtggtctttatggtgttgctaatgctataccattagctgcatccgctgctccagctccacctcctgatctctcgtcttgtagtatagccaggattaacgaaaatcagtggtgccgtacagttgttgcgcgcctaagcctgatgatatggagaaagttccgtattacaagttcccttctatgactaagctccgtgttcgtcagcctgctcctagatagaggagtatattgccaagtacaattgcg

SEQ ID NO: 934 - DNA, 504 bp, Artificial
  Mutation introduced by TALE nuclease pair POT32_T03 within a POT32 allele
gcaagcttgtgcaatagtagtagtacatccctcaaacatccttttacttcttcctccacttctttaacttccactcctaaaccctctcaacttttcatccatggaaaacgtaaccaaatgttcaaagtttcatgcatggttaccaataataacggtgaccaaaaccaaaacgttgaaacgaattctgttgatcgaagaaatgttcttcttggcttaggtggtctttatggtgttgctaatgctataccattagctgcatccgctgctccagctccacctcctgatctctcgcttgtagtatagccaggattaacgaaaatcaggtggtgccgtacagttgttgcgcgcctaagcctgatgatatggagaaagttccgtattacaagttcccttctatgactaagctccgtgttcgtcagcctgctaatgaggagtatattgccaagtacaatctggcgattagtcgaatgaaagatcttgataagacacaacctttaaacccta

SEQ ID NO: 935 - DNA, 517 bp, Artificial
  Mutation introduced by TALE nuclease pair POT32_T03 within a POT32 allele
gcaagcttgtgcaatagtagtagtacatctctcaaaactccttttacttcttcctccacttctttaacttccactcctaagcccctctcaacttttcatccatggaaaacgtaaccaaatgttcaaagtttcatgcaaggttaccaataataacggtgaccaaaaccaaaacgttgaaacgaattctgttgatcgaagaaatgttcttcttggcttaggtggtctttatggtgttgctaatgctataccattagctgcatccgctgctccagctccacctcctgatctctcgtcttgtagtatagccaggattaacgaaaatcaggtggtgccgtacagttgttgcgcgcctaagcctgatgatatggagaaagttccgtattacaagttcccttctatgactaagctccgtgttcgtcagcctgctcatctaatgaggagtatattgccaagtacaatctggcgattagtcgaatgaaagatcttgataagacacaacctttaaaccctattggtt

SEQ ID NO: 936 - DNA, 492 bp, Artificial
  Mutation introduced by TALE nuclease pair POT32_T03 within a POT32 allele
gcaagcttgtgcaatagtagtagtacatctctcaaaactccttttacttcttcctccacttctttatcttccactcctaagcccctctcaacttttcatccatggaaaacgtaaccaaatgttcaaagtttcatgcaaggttaccaataataacggtgaccaaaaccaaaacgttgaaacaaattctgttgatcgaagaaatgttcttcttggcttaggtggtctttatggtgttgctaatgctataccattagctgcatccgctgctccaactccacctcctgatctctcgtcttgtagtatagccaggattaacgaaaatcaggtggtgccgtacagttgttgcgcgcctaagcctgatgatatggagaaagttccgtattacaagttcccttctatgactaagctccgtgttcgtcagcctgctctgaggagtatattgccaagtacaatctggcgattagtcgaatgagagatcttgataagacacaa

SEQ ID NO: 937 - DNA, 494 bp, Artificial
  Mutation introduced by TALE nuclease pair POT32_T03 within a POT32 allele
gcaagcttgtgcaatagttgtagtacatctctcaaaactccttttacttcttcctccacttctttatcttccactcctaagccctctcaacttttcatccatggaaaacgtaaccaaatgttcaaagtttcatgcaaggttaccaataataacggtgaccaaaaccaaaacgttgaaacgaattctgttgatcgaagaaatgttcttcttggcttaggtggtctttatggtgttgctaatgctataccattagctgcatccgctgctccagctccacctcctgatctctcgtcttgtagtatagccaggattaacgaaaatcaggtggtgccgtacagttgttgcgcgcctaagcctgatgatatggagaaagttccgtattacaagttcccttctatgactaagctccgtgttcgtcagcctgctcatgatcccagaatttggcggttagcaagatgagggatcttgataagacacaacctttaaaccctatt

SEQ ID NO: 938 - DNA, 507 bp, Artificial
  Mutation introduced by TALE nuclease pair POT32_T03 within a POT32 allele
gcaagcttgtgcaatagtagtagtacatctctcaaaactccttttacttcttcctccacttctttaacttccactcctaagcccctctcaacttttcatccatggaaaacgtaaccaaatgttcaaagtttcatgcaaggttaccaataataacggtgaccaaaaccaaaacgttgaaacgaattctgttgatcgaagaaatgttcttcttggcttaggtggtctttatggtgttgctaatgctataccattagctgcatccgctgctccagctccacctcctgatctctcgtcttgtagtatagccaggattaacgaaaatcaggtggtgccgtacagttgttgcgcgcctaagcctgatgatatggagaaagttccgtattacaagttcccttctatgactaagctccgtgttcgtcagcctgctcaaatgaggagtatattgccaagtacaatctggcgattagtcgaatgagagatcttgataagacacaacctttaaaccct

SEQ ID NO: 939 - DNA, 494 bp, Artificial
  Mutation introduced by TALE nuclease pair POT32_T03 within a POT32 allele
gcaagcttgtgcaatagtagtagtacatctctcaaaactccttttacttcttcctccacttctttatcttccactcctaagccctctcaacttttcatccatggaaaacgtaaccaaatgttcaaagtttcatgcaaggttaccaataataacggtgaccaaaaccaaaacgttgaaacgaattctgttgatcgaagaaatgttcttcttggcttaggtggtctttatggtgttgctaatgctataccattagctgcatccgctgctccagctccacctcctgatctctcgtcttgtagtatagccaggattaacgaaaatcaggtggtgccgtacagttgttgcgcgcctaagcctgatgatatggagaaagttccgtattacaagttcccttctatgactaagctccgtgttcgtcagccgagtatattgccaagtacaatttggcggttagcaagatgagggatcttgataagacacaaccttttaaaccc

SEQ ID NO: 940 - DNA, 508 bp, Artificial
  Mutation introduced by TALE nuclease pair POT32_T03 within a POT32 allele
gcaagcttgtgcaatagtagtagtacatctctcaaaactccttttacttcttcctccacttctttatcttccactcctaagcccctctcaacttttcatccatggaaaacgtaaccaaatgttcaaagtttcatgcaaggttaccaataataacggtgaccaaaaccaaaacgttgaaacgaattctgttgatcgaagaaatgttcttcttggcttaggtggtctttatggtgttgctaatgctataccattagctgcatccgctgctccagctccacctcctgatctctcgtcttgtagtatagccaggattaacgaaaatcaggtggtgccgtacagttgttgcgcgcctaagcctgatgatatggagaaagttccgtattacaagttcccttctatgactaagctccgtgttcgtcagcctgctcaaatgaggagtatattgccaagtacaatttggcggttagcaagatgagggatcttgataagacacaacctttaaacccta

SEQ ID NO: 941 - DNA, 518 bp, Artificial
  Mutation introduced by TALE nuclease pair POT32_T03 within a POT32 allele
gcaagcttgtgcaatagtagtagtacatctctcaaaactccttttacttcttcctccacttctttaacttccactcctaagcccctctcaacttttcatccatggaaaacgtaaccaaatgttcaaagtttcatgcaaggttaccaataataacggtgaccaaaaccaaaacgttgaaacgaattctgttgatcgaagaaatgttcttcttggcttaggtggtctttatggtgttgctaatgctataccattagccgcatccgctgctccagctccacctcctgatctctcgtcttgtagtatagccaggattaacgaaaatcaggtggtgccgtacagttgttgcgcgcctaagcctgatgatatggagaaagttccgtattacaagttcccttctatgactaagctccgtgttcgtcagcctgctcagctaatgaggagtatattgccaagtacaatctggcgatctagtcgaatgaaagatcttgataagacacaacctttaaaccctattggtt

SEQ ID NO: 942 - DNA, 515 bp, Artificial
  Mutation introduced by TALE nuclease pair POT32_T03 within a POT32 allele
gcaagcttgtgcaatagtagtagtacatctctcaaaactccttttacttcttcctccacttctttaacttccactcctaagccctctcaacttttcatccatggaaaacgtaaccaaatgttcaaagtttcatgcaaggttaccaataataacggtgaccaaaaccaaaacgttgaaacgaattctgttgatcgaagaaatgttcttcttggcttaggtggtctttatggtgttgctaatgctataccattagctgcatccgctgctccagctccacctcctgatctctcgtcttgtagtatagccaggattaacgaaaatcaggtggtgccgtacagttgttgcgcgcctaagcctgatgatatggagaaagttccgtattacaagttcccttctatgactaagctccgtgttcgtcagcctgctcgctaatgaggagtatattgccaagtacaatctggcgattagtcgaatgaaagatcttgataagacacaacctttaaaccctattggtt

SEQ ID NO: 943 - DNA, 472 bp, Artificial
  Mutation introduced by TALE nuclease pair POT32_T03 within a POT32 allele
gcaagcttgtgcaatagtagtagtacatccctcaacatccttttacttcttcctccacttctttaacttccactcctaaaccctctcaacttttcatccatggaaaacgtaaccaaatgttcaaagtttcatgcaaggttaccaataataacggtgaccaaaaccaaaacgttgaaacgaattctgttgatcgaagaaatgttcttcttggcttaggtggtctttatggtgttgctaatgctataccattagctgcatccgctactccatctccacctcctgatctctcgtcttgtagtatagccaggattaacgaaactcatgtggtgccgtacagttgttgcgcgcctaagcctgatgatatggagaaagttccgtattacaagttcccttctatgactaagctccgtgttcgtcagcctgctcaatgaggagtatattgccaagtacaatttggcggttagcaagatga

SEQ ID NO: 944 - DNA, 515 bp, Artificial
  Mutation introduced by TALE nuclease pair POT32_T03 within a POT32 allele
gcaagcttgtgcaatagtagtagtacatctctcaaaactccttttacttcttcctccacttctttaacttccactcctaagccctctcaacttttcatccatggaaaacgtaaccaaatgttcaaagtttcatgcaaggttaccaataataacggtgaccaaaaccaaaacgttgaaacgaattctgttgatcgaagaaatgttcttcttggcttaggtggtctttatggtgttgctaatgctataccattagctgcatccgctgctccagctccacctcctgatctctcgtcttgtagtatagccaggattaacgaaaatcaggtggtgccgtacagttgttgcgcgcctaagcctgatgatatggagaaagttccgtattacaagttcccttctatgactaagctccgtgttcgtcagcctgctcataatgaggagtatattgccaagtacaatttggcggttagcaagatgaggggatcttgataagacacaacctttaaaccctattggtt

SEQ ID NO: 945 - DNA, 508 bp, Artificial
  Mutation introduced by TALE nuclease pair POT32_T03 within a POT32 allele
gcaagcttgtgcaatagtagtagtacatctctcaaaactccttttacttcttcctccacttctttatcttccactcctaagcccctctcaacttttcatccatggaaaacgtaaccaaatgttcaaagtttcatgcaaggttaccaataataacggtgaccaaaaccaaaacgttgaaacaaattctgttgatcgaagaaatgttcttcttggcttaggtggtctttatggtgttgctaatgctataccattagctgcatccgctgctccagctccacctcctgatctctcgtcttgtagtatagccaggattaacgaaaatcaggtggtgccgtacagttgttgcgcgcctaagcctgatgatatggagaaagttccgtattacaagttcccttctatgactaagctccgtgttcgtcagcctgctcaaatgaggagtatattgccaagtacaatttggcggttagcaagatgagggatcttgataagacacaacctttaaacccta

SEQ ID NO: 946 - DNA, 516 bp, Artificial
  Mutation introduced by TALE nuclease pair POT32_T03 within a POT32 allele
gcaagcttgtgcaatagtagtagtacatctctcaaaactccttttacttcttcctccacttctttatcttccactcctaagccctctcaacttttcatccatggaaaacgtaaccaaatgttcaaagtttcatgcaaggttaccaataataacggtgaccaaaaccaaaacgttgaaacgaattctgttgatcgaagaaatgttcttcttggcttaggtggtctttatggtgttgctaatgctataccattagctgcatccgctgctccagctccacctcctgatctctcgtcttgtagtatagccaggattaacgaaaatcaggtggtgccgtacagttgttgcgcgcctaagcctgatgatatggagaaagttccgtattacaagttcccttctatgactaagctccgtgttcgtcagcctgctcagctaatgaggagtatattgccaagtacaatctggcgattagtcgaatgagagatcttgataagacacaacctttaaaccctattggtt

SEQ ID NO: 947 - DNA, 516 bp, Artificial
  Mutation introduced by TALE nuclease pair POT32_T03 within a POT32 allele
gcaagcttgtgcaatagtagtagtacatctctcaaaactccttttacttcttcctccacttctttaacttccactcctaagccctctcaacttttcatccatggaaaacgtaaccaaatgttcaaagtttcatgcaaggttaccaataataacggtgaccaaaaccaaaacgttgaaacgaattctgttgatcgaagaaatgttcttcttggcttaggtggtctttatggtgttgctaatgctataccattagctgcatccgctgctccagctccacctcctgatctctcgtcttgtagtatagccaggattaacgaaaatcaggtggtgccgtacagttgttgcgcgcctaagcctgatgatatggagaaagttccgtattacaagttcccttctatgactaagctccgtgttcgtcagcctgctcagctaatgaggagtatattgccaagtacaatctggcgattagtcgaatgaaagatcttgataagacacaacctttaaaccctattggtt

SEQ ID NO: 948 - DNA, 460 bp, Artificial
  Mutation introduced by TALE nuclease pair POT32_T03 within a POT32 allele
gcaagcttgtgcaatagttgtagtacatcctcaatcaatccttttacttcttcctccacttctttacttccactcctaaccctctcaacttttcatccatggaaaacgtaaccaaatgttcaaagtttcatgcagtgtcaataataacggtgaccaaaaccaaagttgaaacgaattctgttgatcgaagaaatgttcttcttggcttaggtggtctttatggtgttgctaatgctataccattagctgcatccgctactccatctccacctcctgatctctcgtcttgtagtatagccaggattaacgaaaactcatggtggtgccgtacagttgttgcgcgcctaagcctgatgatatggagaaagttccgtattacaagttcccttctatgactaagctccgtgttcgtcagcctgctcatagatagaggagtatattgccaagtacaattgcgttg

SEQ ID NO: 949 - DNA, 518 bp, Artificial
  Mutation introduced by TALE nuclease pair POT32_T03 within a POT32 allele
gcaagcttgtgcaatagttgtagtacatctctcaaaactccttttacttcttcctccacttctttaacttccactcctaaaccctctcaacttttcatccatggaaaacgtaaccaaatgttcaaagtttcatgcaaggttaccaataataacggtgaccaaaaccaaaacgttgaaacgaattctgttgatcgaagaaatgttcttcttggcttaggtggtctttatggtgttgctaatgctataccattagctgcatccgctactccatctccacctcctgatctctcgtcttgtagtatagccaggattaacgaaactcatgtggtgccgtacagttgttgcgcgcctaagcctgatgatatggagaaagttccgtattacaagttcccttctatgactaagctccgtgttcgtcagcctgctcatcgataatgaggagtatattgccaagtacaatttggcggttagcaagatgagggatcttgataagacacaacctttaaaccctattggtt

SEQ ID NO: 950 - DNA, 515 bp, Artificial
  Mutation introduced by TALE nuclease pair POT32_T03 within a POT32 allele
gcaagcttgtgcaatagtagtagtacatctctcaaaactccttttacttcttcctccacttctttatcttccactcctaagcccctctcaacttttcatccatggaaaacgtaaccaaatgttcaaagtttcatgcaaggttaccaataataacggtgaccaaaaccaaaacgttgaaacaaattctgttgatcgaagaaatgttcttcttggcttaggtggtctttatggtgttgctaatgctataccattagctgcatccgctgctccagctccacctcctgatctctcgtcttgtagtatagccaggattaacgaaaatcaggtggtgccgtacagttgttgcgcgcctaagcctgatgatatggagaaagttccgtattacaagttcccttctatgactaagctccgtgttcgtcagcctgctcataatgaggagtatattgccaagtacaatctggcgattagtcgaatgaaagatcttgataagacacaacctttaaaccctattggtt

SEQ ID NO: 951 - DNA, 455 bp, Artificial
  Mutation introduced by TALE nuclease pair POT32_T03 within a POT32 allele
gcaagcttgtgcaatagttgtagtacatctctcaaaactccttttacttcttcctccacttctttaacttccactcctaaaccctctcaacttttcatccatggaaaacgtaaccaaatgttcaaagtttcatgcaaggttaccaataataacggtgaccaaaaccaaaacgttgaaacgaattctgttgatcgaagaaatgttcttcttggcttaggtggtctttatggtgttgctaatgctataccattagctgcatccgctactccatctccacctcctgatctctcgtcttgtagtatagccaggattaacgaaactcatgtggtgccgtacagttgttgcgcgcctaagcctgatgatatggagaaagttccgtattacaagttcccttctatgactaagctccgtgttcgtcagcctgctcatgaggagtatattgccaagtacaattt

SEQ ID NO: 952 - DNA, 493 bp, Artificial
  Mutation introduced by TALE nuclease pair POT32_T03 within a POT32 allele
  misc_feature (159): n is a or c or t or g
gcaagcttgtgcaatagtagtagtacatccctcaaaactccttttacttcttcctccacttctttaacttccactcctaaacccctctcaacttttcatccatggaaaacgtaaccaaatgttcaaagtttcatgcatggttaccaataataacggtgnccaaaaccaaaacgttgaaacgaattctgttgatcgaagaaatgttcttcttggcttaggtggtctttatggtgttgctaatgctataccattagctgcatccgctgctccagctccacctcctgatctctcgccttgtagtatagccaggattaacgaaaatcaggtggtgccgtacagttgttgcgcgcctaagcctgatgatatggagaaagttccgtattacaagttcccttctatgactaagctccgtgttcgtcagcctgctaatgaggagtatattgccaagtacaatctggcgattagtcgaatgaaagatcttgataagacacaa

SEQ ID NO: 953 - DNA, 476 bp, Artificial
  Mutation introduced by TALE nuclease pair POT32_T03 within a POT32 allele
gaagcttgtgcaatagtagtagtacatctctcaaaactccttttacttcttcctccacttctttatcttccactcctaagccctctcaacttttcatccatggaaaacgtaaccaaatgttcaaagtttcatgcaaggttaccaataataacggtgaccaaaaccaaaacgttgaaacaaattctgttgatcgaagaaatgttcttcttggcttaggtggtctttatggtgttgctaatgctataccattagctgcatccgctgctccagctccacctcctgatctctcgtcttgtagtatagccaggattaacgaaaatcaggtggtgccgtacagttgttgcgcgcctaagcctgatgatatggagaaagttccgtattacaagttcccttctatgactaagctccgtgttcgaggagtatattgccaagtacaatttggcggttagcaagatgaggggatcttgataagacac

SEQ ID NO: 954 - DNA, 494 bp, Artificial
  Mutation introduced by TALE nuclease pair POT32_T03 within a POT32 allele
gcaagcttgtgcaatagttgtagtacatccctcaacaatccttttacttcttcctccacttctttaacttccactcctaaaccctctcaacttttcatccatggaaaacgtaaccaaatgttcaaagtttcatgcatggttaccaataataacggtgaccaaaaccaaaacgttgaaacgaattctgttgatcgaagaaatgttcttcttggcttaggtggtctttatggtgttgctaatgctataccattagctgcatccgctactccatctccacctcctgatctctcgtcttgtagtatagccaggattaacgaaactcatgtggtgccgtacagttgttgcgcgcctaagcctgatgatatggagaaagttccgtattacaagttcccttctatgactaagctccgtgttcgtcagcctgaggagtatattgccaagtacaatttggcggttagcaagatgagggatcttgataagacacaacctttaaa

SEQ ID NO: 955 - DNA, 520 bp, Artificial
  Mutation introduced by TALE nuclease pair POT32_T03 within a POT32 allele
gcaagcttgtgcaatagtagtagtacatctctcaaaactccttttacttcttcctccacttctttaacttccactcctaagcccctctcaacttttcatccatggaaaacgtaaccaaatgttcaaagtttcatgcaaggttaccaataataacggtgaccaaaaccaaaacgttgaaacgaattctgttgatcgaagaaatgttcttcttggcttaggtggtctttatggtgttgctaatgctataccattagctgcatccgctactccatctccacctcctgatctctcgtcttgtagtatagccaggattaacgaaactcatgtggtgccgtacagttgttgcgcgcctaagcctgatgatatggagaaagttccgtattacaagttcccttctatgactaagctccgtgttcgtcagcctgctcatggctaatgaggagtatattgccaagtacaatttggcggttagcaagatgagggatcttgataagacacaaccttttaaaccctattggtt

SEQ ID NO: 956 - DNA, 510 bp, Artificial
  Mutation introduced by TALE nuclease pair POT32_T03 within a POT32 allele
  misc_feature (154): n is a or c or t or g
gcaagcttgtgcaatagtagtagtacatctctcaaaactccttttacttcttcctccacttctttatcttccactcctaagcccctctcaacttttcatccatggaaaacgtaaccaaatgttcaaagtttcatgcaaggttacataataacgngcaaaccaaaacgttgaaacgaattctgttgatcgaagaaatgttcttcttggcttaggtggtctttatggtgttgctaatgctataccattagctgcatccgctgctccagctccacctcctgatctctcgtcttgtagtatagccaggattaacgaaaatcaggtggtgccgtacagttgttgcgcgcctaagcctgatgatatggagaaagttccgtattacaagttcccttctatgactaagctccgtgttcgtcagcctgctcactaatgaggagtatattgccaagtacaatctggcgattagtcgaatgagagatcttgataagacacaacctttaaaccctattggtt

SEQ ID NO: 957 - DNA, 515 bp, Artificial
  Mutation introduced by TALE nuclease pair POT32_T03 within a POT32 allele
gcaagcttgtgcaatagtagtagtacatctctcaaaactccttttacttcttcctccacttctttatcttccactcctaagccccctcaacttttcatccatggaaaacgtaaccaaatgttcaaagtttcatgcaaggttaccaataataacggtgaccaaaaccaaaacgttgaaacaaattctgttgatcgaagaaatgttcttcttggcttaggtggtctttatggtgttgctaatgctataccattagctgcatccgctgctccagctccacctcctgatctctcgtcttgtagtatagccaggattaacgaaaatcggtggtgccgtacagttgttgcgcgcctaagcctgatgatatggagaaagttccgtattacaagttcccttctatgactaagctccgtgttcgtcagcctgctcatagatagaggagtatattgccaagtacaatttggcggttagcaagatgagggatcttgataagacacaacctttaaaccctattggtt

SEQ ID NO: 958 - DNA, 511 bp, Artificial
  Mutation introduced by TALE nuclease pair POT32_T03 within a POT32 allele
  misc_feature (146); (155); (268): n is a or c or t or g
gcaagcttgtgcaatagtagtagtacatctctcaaaactccttttacttcttcctccacttctttaacttccactcctaagcccctctcaacttttcatccatggaaaacgtaaccaaatgttcaaagtttcatgcaaggttacanaataatagngcgaaaccaaaacgttgaaacgaattctgttgatcgaagaaatgttcttcttggcttaggtggtctttatggtgttgctaatgctataccattagctgcatccgctgctccantccacctcctgatctctcgtcttgtagtatagccaggattaacgaaaatcaggtggtgccgtacagttgttgcgcgcctaagcctgatgatatggagaaagttccgtattacaagttcccttctatgactaagctccgtgttcgtcagcctgctcatagatagaggagtatattgccaagtacaatctggcgattagtcgaatgaagatcttgataagacacaacctttaaaccctattggtt

SEQ ID NO: 959 - DNA, 465 bp, Artificial
  Mutation introduced by TALE nuclease pair POT32_T03 within a POT32 allele
gcaagcttgtgcaatagtagtagtacatctctcaaaactccttttacttcttcctccacttctttaacttccactcctaagcccctctcaacttttcatccatggaaaacgtaaccaaatgttcaaagtttcatgcaaggttaccaataataacggtgaccaaaaccaaaacgttgaaacaattctgttgatcgaagaaatgttcttcttggcttaggtggtctttatggtgttgctaatgctataccattagctgcatccgctgctccagctccacctcctgatctctcgtcttgtagtatagccaggattaacgaaaatcaggtggtgccgtacagttgttgcgcgcctaagcctgatgatatggagaaagttccgtattacaagttcccttctatgactaagctccgtgttcgtcagcctgctctgataatgaggagtatattgccaagtacaattgcgttg

SEQ ID NO: 960 - DNA, 478 bp, Artificial
  Mutation introduced by TALE nuclease pair POT32_T03 within a POT32 allele
gcaagcttgtgcaatagtagtagtacatctctcaaaactccttttacttcttcctccacttctttaacttccactcctaagcccctctcaacttttcatccatggaaaacgtaaccaaatgttcaaagtttcatgcaaggttaccaataataacggtgaccaaaaccaaaacgttgaaacgaattctgttgatcgaagaaatgttcttcttggcttaggtggtctttatggtgttgctaatgctataccattagctgcatccgctactccatctccacctcctgatctctcgtcttgtagtatagccaggattaacgaaactcatgtggtgccgtacagttgttgcgcgcctaagcctgatgatatggagaaagttccgtattacaagttcccttctatgactaagctccgtgttcgtcagcctgctcatgtaatgaggagtatattgccaagtacaatttggcggttagcaagatga

SEQ ID NO: 961 - DNA, 512 bp, Artificial
  Mutation introduced by TALE nuclease pair POT32_T03 within a POT32 allele
  misc_feature (154): n is a or c or t or g
gcaagcttgtgcaatagtagtagtacatctctcaaaactccttttacttcttcctccacttctttaacttccactcctaagcccctctcaacttttcatccatggaaaacgtaaccaaatgttcaaagtttcatgcaaggttacataataacgngcaaaccaaaacgttgaaacgaattctgttgatcgaagaaatgttcttcttggcttaggtggtctttatggtgttgctaatgctataccattagctgcatccgctgctccagctccacctcctgatctctcgtcttgtagtatagccaggattaacgaaaatcaggtggtgccgtacagttgttgcgcgcctaagcctgatgatatggagaaagttccgtattacaagttcccttctatgactaagctccgtgttcgtcagcctgctcgagcataatgaggagtatattgccaagtacaatctggcgattagtcgaatgaagatcttgataagacacaacctttaaaccctattggtt

SEQ ID NO: 962 - DNA, 508 bp, Artificial
  Mutation introduced by TALE nuclease pair POT32_T03 within a POT32 allele
gcaagcttgtgcaatagtagtagtacatctctcaaaactccttttacttcttcctccacttctttaacttccactcctaagcccctctcaacttttcatccatggaaaacgtaaccaaatgttcaaagtttcatgcaaggttatcaataataacggtgaccaaaacgttgaaacgaattctgttgatcgaagaaatgttcttcttggcttaggtggtctttatggtgttgctaatgctataccattagctgcatccgctgctccaactccacctcctgatctctcgtcttgtagtatagccaggattaacgaaaatcaggtggtgccgtacagttgttgcgcgcctaagcctgatgatatggagaaagttccgtattacaagttcccttctatgactaagctccgtgttcgtcagcctgctctaatgaggagtatattgccaagtacaatctggcgattagtcgaatgagagatcttgataagacacaacctttaaaccctattggtt

SEQ ID NO: 963 - DNA, 517 bp, Artificial
  Mutation introduced by TALE nuclease pair POT32_T03 within a POT32 allele
gcaagcttgtgcaatagtagtagtacatctctcaaaactccttttacttcttcctccacttctttaacttccactcctaagcccctctcaacttttcatccatggaaaacgtaaccaaatgttcaaagtttcatgcaaggttaccaataataacggtgaccaaaccaaaacgttgaaacgaattctgttgatcgaagaaatgttcttcttggcttaggtggtctttatggtgttgctaatgctataccattagctgcatccgctgctccagctccacctcctgatctctcgtcttgtagtatagccaggattaacgaaaatcaggtggtgccgtacagttgttgcgcgcctaagcctgatgatatggagaaagttccgtattacaagttcccttctatgactaagctccgtgttcgtcagcctgctcatctaatgaggagtatattgccaagtacaatttggcggttagcaagatgaggggatcttgataagacacaacctttaaaccctattggtt

SEQ ID NO: 964 - DNA, 505 bp, Artificial
  Mutation introduced by TALE nuclease pair POT32_T03 within a POT32 allele
gcaagcttgtgcaatagttgtagtacatccctcaaaactccttttacttcttcctccacttctttaacttccactcctaaaccctctcaacttttcatccatggaaaacgtaaccaaatgttcaaagtttcatgcatggttaccaataataacggtgaccaaaaccaaaacgttgaaacgaattctgttgatcgaagaaatgttcttcttggcttaggtggtctttatggtgttgctaatgctataccattagctgcatccgctactccatctccacctcctgatctctcgtcttgtagtatagccaggattaacgaaactcatgtggtgccgtacagttgttgcgcgcctaagcctgatgatatggagaaagttccgtattacaagttcccttctatgactaagctccgtgttcgtcagcctgctaatgaggagtatattgccaagtacaatttggcggttagcaagatgagggatcttgataagacacaacctttaaacccta

SEQ ID NO: 965 - DNA, 507 bp, Artificial
  Mutation introduced by TALE nuclease pair POT32_T03 within a POT32 allele
gcaagcttgtgcaatagtagtagtacatctctcaaaactccttttacttcttcctccacttctttatcttccactcctaagcccctctcaacttttcatccatggaaaacgtaaccaaatgttcaaagtttcatgcaaggttaccaataataacggtgaccaaaaccaaaacgttgaaacaaattctgttgatcgaagaaatgttcttcttggcttaggtggtctttatggtgttgctaatgctataccattagctgcatccgctgctccagctccacctcctgatctctcgtcttgtagtatagccaggattaacgaaaatcaggtggtgccgtacagttgttgcgcgcctaagcctgatgatatggagaaagttccgtattacaagttcccttctatgactaagctccgtgttcgtcagcctgctcaatgaggagtatattgccaagtacaatttggcggttagcaagatgagggatcttgataagacacaacctttaaacccta

SEQ ID NO: 966 - DNA, 513 bp, Artificial
  Mutation introduced by TALE nuclease pair POT32_T03 within a POT32 allele
gcaagcttgtgcaatagtagtagtacatctctcaaaactccttttacttcttcctccacttctttaacttccactcctaagccctctcaacttttcatccatggaaaacgtaaccaaatgttcaaagtttcatgcaaggttaccaataataacggtgaccaaaaccaaaacgttgaaacgaattctgttgatcgaagaaatgttcttcttggcttaggtggtctttatggtgttgctaatgctataccattagctgcatccgctgctccagctccacctcctgatctctcgtcttgtagtatagccaggattaacgaaaatcaggtggtgccgtacagttgttgcgcgcctaagcctgatgatatggagaaagttccgtattacaagttcccttctatgactaagctccgtgttcgtcagcctgctctaatgaggagtatattgccaagtacaatctggcgattagtcgaatgaaagatcttgataagacacaacctttaaaccctattggtt

SEQ ID NO: 967 - DNA, 530 bp, Artificial
  Mutation introduced by TALE nuclease pair POT32_T03 within a POT32 allele
  misc_feature (448); (460); (474); (505); (507): n is a or c or t or g
gcaagcttgtgcaatagtagtagtacatctctcaaaactccttttacttcttcctccacttctttatcttccactcctaagcccctctcaacttttcatccatggaaaacgtaaccaaatgttcaaagtttcatgcaaggttaccaataataacggtgaccaaaaccaaaacgttgaaacgaattctgttgatcgaagaaatgttcttcttggcttaggtggtctttatggtgttgctaatgctataccattagctgcatccgctgctccagctccacctcctgatctctcgtcttgtagtatagccaggattaacgaaaatcaggtggtgccgtacagttgttgcgcgcctaagcctgatgatatggagaaagttccgtattacaagttcccttctatgactaagctccgtgttcgtcagcctgctcatgttcatccatagttgccngactccccgtcntgtagataactacnatacgggaggggcttccatctggcccagtgngnaatgataccgcgagacccacgtc

SEQ ID NO: 968 - DNA, 513 bp, Artificial
  Mutation introduced by TALE nuclease pair POT32_T03 within a POT32 allele
gcaagcttgtgcaatagtagtagtacatctctcaaaactccttttacttcttcctccacttctttaacttccactcctaagccctctcaacttttcatccatggaaaacgtaaccaaatgttcaaagtttcatgcaaggttaccaataataacggtgaccaaaaccaaaacgttgaaacgaattctgttgatcgaagaaatgttcttcttggcttaggtggtctttatggtgttgctaatgctataccattagctgcatccgctgctccagtccacctcctgatctctcgtcttgtagtatagccaggattaacgaaaatcaggtggtgccgtacagttgttgcgcgcctaagcctgatgatatggagaaagttccgtattacaagttcccttctatgactaagctccgtgttcgtcagcctgctctaatgaggagtatattgccaagtacaatttggcggttagcaagatgaggggatcttgataagacacaacctttaaaccctattggtt

SEQ ID NO: 969 - DNA, 492 bp, Artificial
  Mutation introduced by TALE nuclease pair POT32_T03 within a POT32 allele
gcaagcttgtgcaatagtagtagtacatctctcaaaactccttttacttcttcctccacttctttaacttccactcctaagcccctctcaacttttcatccatggaaaacgtaaccaaatgttcaaagtttcatgcaaggttaccaataataacggtgaccaaaaccaaaacgttgaaacgaattctgttgatcgaagaaatgttcttcttggcttaggtggtctttatggtgttgctaatgctataccattagctgcatccgctgctccagctccacctcctgatctctcgtcttgtagtatagccaggattaacgaaaatcaggtggtgccgtacagttgttgcgcgcctaagcctgatgatatggagaaagttccgtattacaagttcccttctatgactaagctccgtgttcgtcagcctgcaatgaggagtatattgccaagtacaatctggcgattagtcgaatgagagatcttgataagacacaa

SEQ ID NO: 970 - DNA, 468 bp, Artificial
  Mutation introduced by TALE nuclease pair POT32_T03 within a POT32 allele
  misc_feature (429): n is a or c or t or g
gcaagcttgtgcaatagtagtagtacatctctcaaaactccttttacttcttcctccacttctttatcttccactcctaagccctctcaacttttcatccatggaaaacgtaaccaaatgttcaaagtttcatgcaaggttaccaataataacggtgaccaaaaccaaaacgttgaaacaaattctgttgatcgaagaaatgttcttcttggcttaggtggtctttatggtgttgctaatgctataccattagctgcatccgctgctccagctccacctcctgatctctcgtcttgtagtatagccaggattaacgaaaatcaggtggtgccgtacagttgttgcgcgcctaagcctgatgatatggagaaagttccgtattacaagttcccttctatgactaagctccgtgttcgtcagcctgctcanatatgaggagtatattgccaagtacaattgcgttgcgat

SEQ ID NO: 971 - DNA, 459 bp, Artificial
  Mutation introduced by TALE nuclease pair POT32_T03 within a POT32 allele
  misc_feature (155): n is a or c or t or g
gcaagcttgtgcaatagttgtagtacatctctcaaaactccttttacttcttcctccacttctttacttccactcctaaaccctctcaacttttcatccatggaaaacgtaaccaaatgttcaaagtttcatgcaaggttactataataataagnggactgaaacccaaaaacgttgaaacgaattctgttgatcgaagaaatgttcttcttggcttaggtggtctttatggtgttgctaatgctataccattagctgcatccgctactccatctccacctcctgatctctcgtcttgtagtatagccaggattaacgaaaactcatgtggtgccgtacagttgttgcgcgcctaagcctgatgatatggagaaagttccgtattacaagttcccttctatgactaagctccgtgttcgtcagcctgctcactaatgaggagtatattgccaagtacaa

SEQ ID NO: 972 - DNA, 498 bp, Artificial
  Mutation introduced by TALE nuclease pair POT32_T03 within a POT32 allele
gcaagcttgtgcaatagtagtagtaccactctcaaaactccttttacttcttcctccacttctttatcttccactcctaagcccctctcaacttttcctccatggaaaacgtaacaaaacgttcaaagtttcatgcaaggttaccaataataacggtgaccaaaacgttgaaacgaattctgttgatcgaagaaatgttcttcttggcttaggtggtctttatggtgttgctaatgctataccattagctgcatccgctactccagctccacctcctgatctctcatcttgtagtaaagcaaagattaatgaactacggaggtgccatacagttgttgcgctcccacgccaaaagatatgaagaaagttccatattacaagttcccttctatgactaagctccgtattcgtccccctgctctgaggagtatattgccaagtacaatttggcggttagcaagatgagggatcttgataagacacaacctttaaacccta

SEQ ID NO: 973 - DNA, 498 bp, Artificial
  Mutation introduced by TALE nuclease pair POT32_T03 within a POT32 allele
gcaagcttgtgcaatagtagtagtacatctctcaaaactccttttacttcttcctccacttctttaacttccactcctaagcccctctcaacttttcatccatggaaaacgtaaccaaatgttcaaagtttcatgcaaggttaccaataataacggtgaccaaaaccaaaacgttgaaacgaattctgttgatcgaagaaatgttcttcttggcttaggtggtctttatggtgttgctaatgctataccattagctgcatccgctgctccagctccacctcctgatctctcgtcttgtagtatagccaggattaacgaaaatcaggtggtgccgtacagttgttgcgcgcctaagcctgatgatatggagaaagttccgtattacaagttcccttctatgactaagctccgtgttcgtcagcctgctaatgaggagtatattgccaagtacaatctggcgattagtcgaatgaaagatcttgataagacacaaccttt

SEQ ID NO: 974 - DNA, 514 bp, Artificial
  Mutation introduced by TALE nuclease pair POT32_T03 within a POT32 allele
gcaagcttgtgcaatagtagtagtacatctctcaaaactccttttacttcttcctccacttctttatcttccactcctaagcccctctcaacttttcatccatggaaaacgtaaccaaatgttcaaagtttcatgcaaggttaccaataataacggtgaccaaaaccaaaacgttgaaacaattctgttgatcgaagaaatgttcttcttggcttaggtggtctttatggtgttgctaatgctataccattagctgcatccgctgctccagctccacctcctgatctctcgtcttgtagtatagccaggattaacgaaaatcaggtggtgccgtacagttgttgcgcgcctaagcctgatgatatggagaaagttccgtattacaagttcccttctatgactaagctccgtgttcgtcagcctgctctagatagaggagtatattgccaagtacaatctggcgattagtcgaatgaagatcttgataagacacaacctttaaaccctattggtt

SEQ ID NO: 975 - DNA, 463 bp, Artificial
  Mutation introduced by TALE nuclease pair POT32_T03 within a POT32 allele
gcaagcttgtagatagtagtagtacatctctcaaaactccttttacttcttcctccacttctttacttccactcctaagcccctctcaacttttcatccatggaaaacgtaaccaaatgttcaaagtttcatgcaaggttaccaataataacggtgaccaaaaccaaaacgttgaaacaattctgttgatcgaagaaatgttcttcttggcttaggtggtctttatggtgttgctaatgctataccattagctgcatccgctgctccagctccacctcctgatctctcgtcttgtagtatagccaggattaacgaaaatcaggtggtgccgtacagttgttgcgcgcctaagcctgatgatatggagaaagttccgtattacaagttcccttctatgactaagctccgtgttcgtcagcctgctctagatatgaggagtatattgccaagtacaattgcgttg

SEQ ID NO: 976 - DNA, 455 bp, Artificial
  Mutation introduced by TALE nuclease pair POT32_T03 within a POT32 allele
gcaagcttgtgcaatagtagtagtacatctctcaaaactccttttacttcttcctccacttctttatcttccactcctaagccctctcaacttttcatccatggaaaacgtaaccaaatgttcaaagtttcatgcaaggttaccaataataacggtgaccaaaaccaaaacagttgaaacaaattctgttgatcgaagaaatgttcttcttggcttaggtggtctttatggtgttgctaatgctataccattagctgcatccgctgctccagctccacctcctgatctctcgtcttgtagtatagccaggattaacgaaaatcaggtggtgccgtacagttgttgcgcgcctaagcctgatgatatggagaaagttccgtattacaagttcccttctatgactaagctccgtgttcgtcagcctgctctaatgaggagtatattgccaagtacaa

SEQ ID NO: 977 - DNA, 504 bp, Artificial
  Mutation introduced by TALE nuclease pair POT32_T03 within a POT32 allele
gcaagcttgtgcaatagtagtagtaccactctcaaaactccttttacttcttcctccacttctttatcttccactcctaagccctctcaacttttcctccatggaaaacgtaacaaaacgttcaaagtttcatgcaaggttaccaataataacggtgaccaaaaccaaaacgttgaaacgaattctgttgatcgaagaaatgttcttcttggcttaggtggtctttatggtgttgctaatgctataccattagctgcatccgctactccatctccacctcctgatctctcatcttgtagtaaagcaaagattaatgaaactacggaggtgccatacagttgttgcgctcccacgcctaaagatatgaagaaagttccatattacaagttcccttctatgactaagctccgtattcgtcccatctaatgaggagtatattgccaagtacaatttggcggttagcaagatgaggggatcttgataagacacaacctttaaacccta

SEQ ID NO: 978 - DNA, 516 bp, Artificial
  Mutation introduced by TALE nuclease pair POT32_T03 within a POT32 allele
gcaagcttgtgcaatagttgtagtacatctctcaaaactccttttacttcttcctccacttctttaacttccactcctaagcccctctcaacttttcatccatggaaaacgtaaccaaatgttcaaagtttcatgcaaggttaccaataataacggtgaccaaaaccaaaacgttgaaacgaattctgttgatcgaagaaatgttcttcttggcttaggtggtctttatggtgttgctaatgctataccattagctgcatccgctgctccagctccacctcctgatctctcgtcttgtagtatagccaggattaacgaaactcatgtggtgccgtacagttgttgcgcgcctaagcctgatgatatggagaaagttccgtattacaagttcccttctatgactaagctccgtgttcgtcagcctgctcataatgaggagtatattgccaagtacaatttggcggttagcaagatgaggggatcttgataagacacaacctttaaaccctattggtt

SEQ ID NO: 979 - DNA, 462 bp, Artificial
  Mutation introduced by TALE nuclease pair POT32_T03 within a POT32 allele
gcaagcttgtgcaatagttgtagtacatctctcaaaactccttttacttcttcctccacttctttaacttccactcctaacgcctctcaacttttcatccatggaaaacgtaaccaaatgttcaaagtttcatgcaaggttaccaataataacggtgaccaaaaccaaaacgttgaaacgaattctgttgatcgaagaaatgttcttcttggcttaggtggtctttatggtgttgctaatgctataccattagctgcatccgctgctccagctccacctcctgatctctcgtcttgtagtatagccaggattaacgaaaatcaggtggtgccgtacagttgttgcgcgcctaagcctgatgatatggagaaagttccgtattacaagttcccttctatgactaagctccgtgttcgtcagcctgctcatagatagaggagtatattgccaagtacaattgcg

SEQ ID NO: 980 - DNA, 512 bp, Artificial
  Mutation introduced by TALE nuclease pair POT32_T03 within a POT32 allele
gcaagcttgtgcaatagtagtagtacatctctcaaaactccttttacttcttcctccacttctttaacttccactcctaagccctctcaacttttcatccatggaaaacgtaaccaaatgttcaaagtttcatgcaaggttaccaataataacggtgaccaaaaccaaaacgttgaaacgaattctgttgatcgaagaaatgttcttcttggcttaggtggtctttatggtgttgctaatgctataccattagctgcatccgctgctccagctccacctcctgatctctcgtcttgtagtatagccaggattaacgaaaatcaggtggtgccgtacagttgttgcgcgcctaagcctgatgatatggagaaagttccgtattacaagttcccttctatgactaagctccgtgttcgtcagcctgctcataatgaggagtatattgccaagtacaatctggcgattagtcgaatgaaagatcttgataagacacaacctttaacctattggtt

SEQ ID NO: 981 - DNA, 503 bp, Artificial
  Mutation introduced by TALE nuclease pair POT32_T03 within a POT32 allele
gcaacttgtgcaatagtagtagtacatctctcaaaactccttttacttcttcctccacttctttatcttccactcctaagcccctctcaacttttcatccatggaaaacgtaaccaaatgttcaaagtttcatgcaaggttaccaataataacggtgaccaaaaccaaaacgttgaaacaaattctgttgatcgaagaaatgttcttcttggcttaggtggtctttatggtgttgctaatgctataccattagctgcatccgctgctccagctccacctcctgatctctcgtcttgtagtatagccaggattaacgaaaatcaggtggtgccgtacagttgttgcgcgcctaagcctgatgatatggagaaagttccgtattacaagttcccttctatgactaagctccgtgttcgtcagcctgctcatgaagtatattgccaagtacaatctggcgattagtcgaatgaaagatcttgataagacacaacctttaaacccta

SEQ ID NO: 982 - DNA, 457 bp, Artificial
  Mutation introduced by TALE nuclease pair POT32_T03 within a POT32 allele
gcaagcttgtgcaatagtagtagtacatctctcaaaactccttttacttcttcctccacttctttaacttccactcctaaaccctctcaacttttcatccatggaaaacgtaaccaaatgttcaaagtttcatgcaaggttaccaataataacggtgaccaaaaccaaaacgttgaaacgaattctgttgatcgaagaaatgttcttcttggcttgtggtcttatgtgttgtatgactataccattagctgcatccgctactccatctccacctcctgatctctcgtcttgtagtatagccaggattaacgaaaactcatgtggtgccgtacagttgttgcgcgcctaagcctgatgatatggagaaagttccgtattacaagttcccttctatgactaagctccgtgttcgtcagcctgctcactaatgaggagtatattgccaagtacaattgcg

SEQ ID NO: 983 - DNA, 545 bp, Artificial
  Mutation introduced by TALE nuclease pair POT32_T03 within a POT32 allele
  misc_feature (149); (152): n is a or c or t or g
gcaagcttgtgcaatagttgtagtacatccctcaacatccttttacttcttcctccacttctttaacttccactcctaaaccctctcaacttttcatccatggaaaacgtaaccaaatgttcaaagtttcatgcagttgctacaataanagnggcgaaccaaaaccaaacgttgaaacgaattctgttgatcgaagaaatgttcttcttggcttaggtggtctttatggtgttgctaatgctataccattagctgcatccgctgctccaactccacctcctgatctctcgtcttgtagtatagccaggattaacgaaaatcaggtggtgccgtacagttgttgcgcgcctaagcctgatgatatggagaaagttccgtattacaagttcccttctatgactaagctccgtgttcgtcagcctgctgtttgccgacgccaacgatcgcttcgtgtgtcgcctctggcaacgctgagtatattgccaagtacaatctggcgattagtcgaatgagagatcttgataagacacaacctttaaacccta

SEQ ID NO: 984 - DNA, 513 bp, Artificial
  Mutation introduced by TALE nuclease pair POT32_T03 within a POT32 allele
gcaagcttgtgcaatagtagtagtacatctctcaaaactccttttacttcttcctccacttctttaacttccactcctaagcccctctcaacttttcatccatggaaaacgtaaccaaatgttcaaagtttcatgcaaggttaccaataataacggtgaccaaaaccaaaacgttgaaacgaattctgttgatcgaagaaatgttcttcttggcttaggtggtctttatggtgttgctaatgctataccattagctgcatccgctgctccagctccacctcctgatctctcgtcttgtagtatagccaggattaacgaaaatcaggtggtgccgtacagttgttgcgcgcctaagcctgatgatatggagaaagttccgtattacaagttcccttctatgactaagctccgtgttcgtcagcctgctcataatgaggagtatattgccaagtacaatctggcgattagtcgaatgaaagatcttgataagacacaacctttaacctattggtt

SEQ ID NO: 985 - DNA, 516 bp, Artificial
  Mutation introduced by TALE nuclease pair POT32_T03 within a POT32 allele
gcaagcttgtgcaatagtagtagtacatctctcaaaactccttttacttcttcctccacttctttaacttccactcctaagcccctctcaacttttcatccatggaaaacgtaaccaaatgttcaaagtttcatgcaaggttaccaataataacggtgaccaaaaccaaaacgttgaaacgaattctgttgatcgaagaaatgttcttcttggcttaggtggtctttatggtgttgctaatgctataccattagctgcatccgctgctccagctccacctcctgatctctcgtcttgtagtatagccaggattaacgaaaatcaggtggtgccgtacagttgttgcgcgcctaagcctgatgatatggagaaagttccgtattacaagttcccttctatgactaagctccgtgttcgtcagcctgctcataatgaggagtatattgccaagtacaatttggcggttagcaagatgaggggatcttgataagacacaacctttaaaccctattggtt

SEQ ID NO: 986 - DNA, 514 bp, Artificial
  Mutation introduced by TALE nuclease pair POT32_T03 within a POT32 allele
gcaagcttgtgcaatagtagtagtacatctctcaaaactccttttacttcttcctccacttctttaacttccactcctaagccctctcaacttttcatccatggaaaacgtaaccaaatgttcaaagtttcatgcaaggttaccaataataacggtgaccaaaaccaaaacgttgaaacgaattctgttgatcgaagaaatgttcttcttggcttaggtggtctttatggtgttgctaatgctataccattagctgcatccgctgctccagctccacctcctgatctctcgtcttgtagtatagccaggattaacgaaaatcaggtggtgccgtacagttgttgcgcgcctaagcctgatgatatggagaaagttccgtattacaagttcccttctatgactaagctccgtgttcgtcagcctgctactaatgaggagtatattgccaagtacaatctggcgattagtcgaatgaaagatcttgataagacacaacctttaaaccctattggtt

SEQ ID NO: 987 - DNA, 517 bp, Artificial
  Mutation introduced by TALE nuclease pair POT32_T03 within a POT32 allele
gcaagcttgtgcaatagtagtagtacatctctcaaaactccttttacttcttcctccacttctttaacttccactcctaagccctctcaacttttcatccatggaaaacgtaaccaaatgttcaaagtttcatgcaaggttaccaataataacggtgaccaaaaccaaaacgttgaaacaaattctgttgatcgaagaaatgttcttcttggcttaggtggtctttatggtgttgctaatgctataccattagctgcatccgctgctccagctccacctcctgatctctcgtcttgtagtatagccaggattaacgaaaatcaggtggtgccgtacagttgttgcgcgcctaagcctgatgatatggagaaagttccgtattacaagttcccttctatgactaagctccgtgttcgtcagcctgctcatgataatgaggagtatattgccaagtacaatctggcgattagtcgaatgaaagatcttgataagacacaacctttaaaccctattggtt

SEQ ID NO: 988 - DNA, 501 bp, Artificial
  Mutation introduced by TALE nuclease pair POT32_T03 within a POT32 allele
gcaagcttgtgcaatagttgtagtacatccctcaaaacatccttttacttcttcctccacttctttaacttccactcctaaaccctctcaacttttcatccatggaaaacgtaaccaaatgttcaaagtttcatgcatggttaccaataataacggtgaccaaaaccaaaacgttgaaacgaattctgttgatcgaagaaatgttcttcttggcttaggtggtctttatggtgttgctaatgctataccattagctgcatccgctactccatctccacctcctgatctctcgtcttgtagtatagccaggattaacgaaactcatgtggtgccgtacagttgttgcgcgcctaagcctgatgatatggagaaagttccgtattacaagttcccttctatgactaagctccgtgttcgtcgctaatgaggagtatattgccaagtacaatttggcggttagcaagatgagggatcttgataagacacaacctttaaacccta

SEQ ID NO: 989 - DNA, 518 bp, Artificial
  Mutation introduced by TALE nuclease pair POT32_T03 within a POT32 allele
  misc_feature (159): n is a or c or t or g
gcaagcttgtgcaatagttgtagtacatccctcaaaactccttttacttcttcctccacttctttaacttccactcctaaacccctctcaacttttcatccatggaaaacgtaaccaaatgttcaaagtttcatgcatggttaccaataataacggtgnccaaaaccaaaacgttgaaacgaattctgttgatcgaagaaatgttcttcttggcttaggtggtctttatggtgttgctaatgctataccattagctgcatccgctactccatctccacctcctgatctctcgtcttgtagtatagccaggattaacgaaactcatgtggtgccgtacagttgttgcgcgcctaagcctgatgatatggagaaagttccgtattacaagttcccttctatgactaagctccgtgttcgttcactctcaaatccaaataatctgcaccggatctcgcccttacctgctagtcaagtacaattttgggccggtttagcaagatgaggggatcttgataaga

SEQ ID NO: 990 - DNA, 498 bp, Artificial
  Mutation introduced by TALE nuclease pair POT32_T03 within a POT32 allele
gcaagcttgtgcaatagtagtagtacatctctcaaaactccttttacttcttcctccacttctttaacttccactcctaagcccctctcaacttttcatccatggaaaacgtaaccaaatgttcaaagtttcatgcaaggttaccaataataacggtgaccaaaaccaaaacgttgaaacgaattctgttgatcgaagaaatgttcttcttggcttaggtggtctttatggtgttgctaatgctataccattagctgcatccgctgctccagctccacctcctgatctctcgtcttgtagtatagccaggattaacgaaaatcaggtggtgccgtacagttgttgcgcgcctaagcctgatgatatggagaaagttccgtattacaagttcccttctatgactaagctccgtgttcgtcagcctgctcattattgccaagtacaatctggcgattagtcgaatgaaagatcttgataagacacaacctttaaacccta

SEQ ID NO: 991 - DNA, 487 bp, Artificial
  Mutation introduced by TALE nuclease pair POT32_T03 within a POT32 allele
  misc_feature (158): n is a or c or t or g
gcaagcttgtgcaatagttgtagtacatccctcaaaactccttttacttcttcctccacttctttaacttccactcctaaaccctctcaacttttcatccatggaaaacgtaaccaaatgttcaaagtttcatgcatggttaccaataataacggtgnccaaaaccaaaacgttgaaacgaattctgttgatcgaagaaatgttcttcttggcttaggtggtctttatggtgttgctaatgctataccattagctgcatccgctactccatctccacctcctgatctctcgtcttgtagtatagccaggattaacgaaactcatgtggtgccgtacagttgttgcgcgcctaagcctgatgatatggagaaagttccgtattacaagttcccttctatgactaagctccgtgttcgtcagcctgaggagtatattgccaagtacaatttggcggttagcaagatgaggggatcttgataagacacaa

SEQ ID NO: 992 - DNA, 489 bp, Artificial
  Mutation introduced by TALE nuclease pair POT32_T03 within a POT32 allele
gcaagcttgtgcaatagtagtagtacatctctcaaaactccttttacttcttcctccacttctttatcttccactcctaagcccctctcaacttttcatccatggaaaacgtaaccaaatgttcaaagtttcatgcaaggttaccaataataacggtgaccaaaaccaaaacgttgaaacgaattctgttgatcgaagaaatgttcttcttggcttaggtggtctttatggtgttgctaatgctataccattagctgcatccgctgctccagctccacctcctgatctctcgtcttgtagtatagccaggattaacgaaaatcaggtggtgccgtacagttgttgcgcgcctaagcctgatgatatggagaaagttccgtattacaagttcccttctatgactaagctccgtgttcgtcagcctgctcaaatgaggagtatattgccaagtacaatttggcggttagcaagatgagggatcttgataag

SEQ ID NO: 993 - DNA, 463 bp, Artificial
  Mutation introduced by TALE nuclease pair POT32_T03 within a POT32 allele
gcaagcttgtgcaatagtagtagtacatctctcaaaactccttttacttcttcctccacttctttatcttccactcctaagcccctctcaacttttcatccatggaaaacgtaaccaaatgttcaaagtttcatgcaaggttaccaataataacggtgaccaaaaccaaaacgttgaaacgaattctgttgatcgaagaaatgttcttcttggcttaggtggtctttatggtgttgctaatgctataccattagctgcatccgctgctccagctccacctcctgatctctcgtcttgtagtatagccaggattaacgaaaatcaggtggtgccgtacagttgttgcgcgcctaagcctgatgatatggagaaagttccgtattacaagttcccttctatgactaagctccgtgttcgtcagccgagtatattgccaagtacaatttggcggttagcaagatga

SEQ ID NO: 994 - DNA, 495 bp, Artificial
  Mutation introduced by TALE nuclease pair POT32_T03 within a POT32 allele
gcaagcttgtgcaatagtagtagtacatctctcaaaactccttttacttcttcctccacttctttatcttccactcctaagccctctcaacttttcatccatggaaaacgtaaccaaatgttcaaagtttcatgcaaggttaccaataataacggtgaccaaaaccaaaacgttgaaacgaattctgttgatcgaagaaatgttcttcttggcttaggtggtctttatggtgttgctaatgctataccattagctgcatccgctgctccagctccacctcctgatctctcgtcttgtagtatagccaggattaacgaaaatcaggtggtgccgtacagttgttgcgcgcctaagcctgatgatatggagaaagttccgtattacaagttcccttctatgactaagctccgtgttcgtcagccgagtatattgccaagtacaatttggcggttagcaagatgaggggatcttgataagacacaaccttttaaaccc

SEQ ID NO: 995 - DNA, 503 bp, Artificial
  Mutation introduced by TALE nuclease pair POT32_T03 within a POT32 allele
gcaagcttgtgcaatagtagtagtacatctctcaaaactccttttacttcttcctccacttctttaacttccactcctaagcccctctcaacttttcatccatggaaaacgtaaccaaatgttcaaagtttcatgcaaggttaccaataataacggtgaccaaaaccaaaacgttgaaacgaattctgttgatcgaagaaatgttcttcttggcttaggtggtctttatggtgttgctaatgctataccattagctgcatccgctgctccagctccacctcctgatctctcgtcttgtagtatagccaggattaacgaaaatcaggtggtgccgtacagttgttgcgcgcctaagcctgatgatatggagaaagttccgtattacaagttcccttctatgactaagctccgtgttcgtcagcctgctcaaatgaggagtatattgccaagtacaatctggcgattagtcgaatgagagatcttgataagacacaacctttaaa

SEQ ID NO: 996 - DNA, 510 bp, Artificial
  Mutation introduced by TALE nuclease pair POT32_T03 within a POT32 allele
  misc_feature (471): n is a or c or t or g
gcaagcttgtgcaatagtagtagtacatctctcaaaactccttttacttcttcctccacttctttatcttccactcctaagcccctctcaacttttcatccatggaaaacgtaaccaaatgttcaaagtttcatgcaaggttatcaataataacggtgccaaaacgttgaaacgaattctgttgatcgaagaaatgttcttcttggcttaggtggtctttatggtgttgctaatgctataccattagctgcatccgctgctccaactccacctcctgatctctcgtcttgtagtatagtcaggattaacgaaaatcaggtggtgccgtacagttgttgcgcgcctaagcctgatgatatggagaaagttccgtattacaagttcccttctatgactaagctccgtgttcgtcagcctgctcagctaatgaggagtatattgccaagtacaatctggcgattagtcgaatgngagatcttgataagacacaacctttaaaccctattggtt

SEQ ID NO: 997 - DNA, 515 bp, Artificial
  Mutation introduced by TALE nuclease pair POT32_T03 within a POT32 allele
gcaagcttgtgcaatagttgtagtacatctctcaaaactccttttacttcttcctccacttctttaacttccactcctaagccctctcaacttttcatccatggaaaacgtaaccaaatgttcaaagtttcatgcaaggttaccaataataacggtgaccaaaaccaaaacgttgaaacgaattctgttgatcgaagaaatgttcttcttggcttaggtggtctttatggtgttgctaatgctataccattagctgcatccgctgctccagctccacctcctgatctctcgtcttgtagtatagccaggattaacgaaactcatgtggtgccgtacagttgttgcgcgcctaagcctgatgatatggagaaagttccgtattacaagttcccttctatgactaagctccgtgttcgtcagcctgctcataatgaggagtatattgccaagtacaatttggcggttagcaagatgaggggatcttgataagacacaacctttaaaccctattggtt

SEQ ID NO: 998 - DNA, 505 bp, Artificial
  Mutation introduced by TALE nuclease pair POT32_T03 within a POT32 allele
gcaagcttgtgcaatagtagtagtacatctctcaaaaccttccttttacttcttcctccacttctttcatcttccactcctaacgccctctcaactttttcatccatggaaaacgtaaccaaaatgttcaaagtttcatgcaaggttatcaataataacggtgaccaaaacgttgaaacgaattctgttgatcgaagaaatgttcttcttggcttaggtggtctttatggtgttgctaatgctataccattagctgcatccgctgctccaactccacctcctgatctctcgtcttgtagtatagccaggattaacgaaaatcaggtggtgccgtacagttgttgcgcgcctaagcctgatgatatggagaaagttccgtattacaagttcccttctatgactaagctccgtgttcgtcagcctgctaatgaggagtatattgccaagtacaatctggcgattagtcgaatgagagatcttgataagacacaacctttaaacccta

SEQ ID NO: 999 - DNA, 513 bp, Artificial
  Mutation introduced by TALE nuclease pair POT32_T03 within a POT32 allele
gcaagcttgtgcaatagtagtagtacatctctcaaaactccttttacttcttcctccacttctttatcttccactcctaagccctctcaacttttcatccatggaaaacgtaaccaaatgttcaaagtttcatgcaaggttaccaataataacggtgaccaaaaccaaaacgttgaaacgaattctgttgatcgaagaaatgttcttcttggcttaggtggtctttatggtgttgctaatgctataccattagctgcatccgctgctccagctccacctcctgatctctcgtcttgtagtatagccaggattaacgaaaatcaggtggtgccgtacagttgttgcgcgcctaagcctgatgatatggagaaagttccgtattacaagttcccttctatgactaagctccgtgttcgtcagcctgctcatatgaggagtatattgccaagtacaatttggcggttagcaagatgagggatcttgataagacacaacctttaaaccctattggtt

SEQ ID NO: 1000 - DNA, 486 bp, Artificial
  Mutation introduced by TALE nuclease pair POT32_T03 within a POT32 allele
gcaagcttgtgcaatagtagtagtacatctctcaaaactccttttacttcttcctccacttctttatcttccactcctaagcccctctcaacttttcatccatggaaaacgtaaccaaatgttcaaagtttcatgcaaggttaccaataataacggtgaccaaaaccaaaacgttgaaacgaattctgttgatcgaagaaatgttcttcttggcttaggtggtctttatggtgttgctaatgctataccattagctgcatccgctgctccagctccacctcctgatctctcgtcttgtagtatagccaggattaacgaaaatcaggtggtgccgtacagttgttgcgcgcctaagcctgatgatatggagaaagttccgtattacaagttcccttctatgactaagctccgtgttcgtcagccgagtatattgccaagtacaatttggcggttagcaagatgaggggatcttgataagacacaacc

SEQ ID NO: 1001 - DNA, 515 bp, Artificial
  Mutation introduced by TALE nuclease pair POT32_T03 within a POT32 allele
gcaagcttgtgcaatagttgtagtacatctctcaaaactccttttacttcttcctccacttctttaacttccactcctaagcccctctcaacttttcatccatggaaaacgtaaccaaatgttcaaagtttcatgcaaggttaccaataataacggtgaccaaaaccaaaacgttgaaacgaattctgttgatcgaagaaatgttcttcttggcttaggtggtctttatggtgttgctaatgctataccattagctgcatccgctgctccagctccacctcctgatctctcgtcttgtagtatagccaggattaacgaaactcatgtggtgccgtacagttgttgcgcgcctaagcctgatgatatggagaaagttccgtattacaagttcccttctatgactaagctccgtgttcgtcagcctgctcataatgaggagtatattgccaagtacaatttggcggttagcaagatgagggatcttgataagacacaacctttaaaccctattggtt

SEQ ID NO: 1002 - DNA, 514 bp, Artificial
  Mutation introduced by TALE nuclease pair POT32_T03 within a POT32 allele
gcaagcttgtgcaatagtagtagtaccactctcaaaactccttttacttcttcctccacttctttatcttccactcctaagcccctctcaacttttcctccatggaaaacgtaacaaaacgttcaaagtttcatgcaaggttaccaataataacggtgaccaaaaccaaaacgttgaaacgaattctgttgatcgaagaaatgttcttcttggcttaggtggtctttatggtgttgctaatgctataccattagctgcatccgctactccatctccacctcctgatctctcatcttgtagtaaagcaaagattaatgaaactacggaggtgccatacagttgttgcgctcccacgcctaaagatatgaagaaagttccatattacaagttcccttctatgactaagctccgtattcgtcccctgctcataatgaggagtatattgccaagtacaatttggcggttagcaagatgagggatcttgataagacacaacctttaaaccctattggtt

SEQ ID NO: 1003 - DNA, 514 bp, Artificial
  Mutation introduced by TALE nuclease pair POT32_T03 within a POT32 allele
gcaagcttgtgcaatagttgtagtacatctctcaaaactccttttacttcttcctccacttctttaacttccactcctaaaccctctcaacttttcatccatggaaaacgtaaccaaatgttcaaagtttcatgcaaggttaccaataataacggtgaccaaaaccaaaacgttgaaacgaattctgttgatcgaagaaatgttcttcttggcttaggtggtctttatggtgttgctaatgctataccattagctgcatccgctactccatctccacctcctgatctctcgtcttgtagtatagccaggattaacgaaactcatgtggtgccgtacagttgttgcgcgcctaagcctgatgatatggagaaagttccgtattacaagttcccttctatgactaagctccgtgttcgtcagcctgctcataatgaggagtatattgccaagtacaatctggcgattagtcgaatgaaagatcttgataagacacaacctttaaaccctattggtt

SEQ ID NO: 1004 - DNA, 490 bp, Artificial
  Mutation introduced by TALE nuclease pair POT32_T03 within a POT32 allele
gcaagcttgtgcaatagtagtagtacatctctcaaaactccttttacttcttcctccacttctttatcttccactcctaagccctctcaacttttcatccatggaaaacgtaaccaaatgttcaaagtttcatgcaaggttaccaataataacggtgaccaaaaccaaaacgttgaaacgaattctgttgatcgaagaaatgttcttcttggcttaggtggtctttatggtgttgctaatgctataccattagctgcatccgctgctccagctccacctcctgatctctcgtcttgtagtatagccaggatttaacgaaaatcaggtggtgccgtacagttgttgcgcgcctaaagcctgatgatatgggagaaaggttccgtattacaagttcccttctatgactaagctccgtgttcgtaatgaggagtatattgccaagtacaattttggcggttagcaagatgagggatcttgataagacacaacc

SEQ ID NO: 1005 - DNA, 500 bp, Artificial
  Mutation introduced by TALE nuclease pair POT32_T03 within a POT32 allele
gcaagcttgtgcaatagttgtagtacatccctcaaaactccttttacttcttcctccacttctttatcttccactcctaagcccctctcaacttttcatccatggaaaacgtaacaaaacgttcaaagtttcatgcaaggttaccaataataacggtgaccaaaacgttgaaacgaattctgttgatcgaagaaatgttcttcttggcttaggtggtctttatggtgttgctaatgctataccattagctgcatccgctactccagctccacctcctgatctctcatcttgtagtaaagcaaagattaatgaaactacggaggtgccatacagttgttgcgctcccacgcctaaagatatgaagaaagttccatattacaagttcccttctatgactaagctccgtattcgtcccctgctcaatgaggagtatattgccaagtacaatttggcggttagcaagatgagggatcttgataagacacaacctttaaacccta

SEQ ID NO: 1006 - DNA, 514 bp, Artificial
  Mutation introduced by TALE nuclease pair POT32_T03 within a POT32 allele
gcaagcttgtgcaatagtagtagtacatccctcaaaactccttttacttcttcctccacttctttaacttccactcctaaaccctctcaacttttcatccatggaaaacgtaaccaaatgttcaaagtttcatgcatggttaccaataataacggtgaccaaaaccaaaacgttgaaacgaattctgttgatcgaagaaatgttcttcttggcttaggtggtctttatggtgttgctaatgctataccattagctgcatccgctactccatctccacctcctgatctctcgtcttgtagtatagccaggattaacgaaactcatgtggtgccgtacagttgttgcgcgcctaagcctgatgatatggagaaagttccgtattacaagttcccttctatgactaagctccgtgttcgtcagcctgctcataatgaggagtatattgccaagtacaatctggcgattagtcgaatgaaagatcttgataagacacaacctttaaaccctattggtt

SEQ ID NO: 1007 - DNA, 493 bp, Artificial
  Mutation introduced by TALE nuclease pair POT32_T03 within a POT32 allele
gcaagcttgtgcaatagttgtagtacatccctcaaaactccttttacttcttcctccacttctttaacttccactcctaaaccctctcaacttttcatccatggaaaacgtaaccaaatgttcaaagtttcatgcatggttaccaataataacggtgaccaaaaccaaaacgttgaaacgaattctgttgatcgaagaaatgttcttcttggcttaggtggtctttatggtgttgctaatgctataccattagctgcatccgctactccatctccacctcctgatctctcgtcttgtagtatagccaggattaacgaaactcatgtggtgccgtacagttgttgcgcgcctaagcctgatgatatggagaaagttccgtattacaagttcccttctatgactaagctccgtgttcgtcagcctgctaatgaggagtatattgccaagtacaatttggcggttagcaagatgaggggatcttgataagacacaa

SEQ ID NO: 1008 - DNA, 512 bp, Artificial
  Mutation introduced by TALE nuclease pair POT32_T03 within a POT32 allele
gcaagcttgcaatagtagtagtacatctctcaaaactccttttacttcttcctccacttctttatcttccactcctaagcccctctcaacttttcatccatggaaaacgtaaccaaatgttcaaagtttcatgcaaggttaccaataataacggtgaccaaaaccaaaacgttgaaacaaattctgttgatcgaagaaatgttcttcttggcttaggtggtctttatggtgttgctaatgctataccattagctgcatccgctgctccagctccacctcctgatctctcgtcttgtagtatagccaggattaacgaaaatcaggtggtgccgtacagttgttgcgcgcctaagcctgatgatatggagaaagttccgtattacaagttcccttctatgactaagctccgtgttcgtcagcctgctctaatgaggagtatattgccaagtacaatttggcggttagcaagatgagggatcttgataagacacaacctttaaaccctattggtt

SEQ ID NO: 1009 - DNA, 498 bp, Artificial
  Mutation introduced by TALE nuclease pair POT32_T03 within a POT32 allele
gcaagcttgtgcaatagtagtagtacatctctcaaaactccttttacttcttcctccacttctttatcttccactcctaagcccctctcaacttttcatccatggaaaacgtaaccaaatgttcaaagtttcatgcaaggttatcaataataacggtgaccaaaacgttgaaacgaattctgttgatcgaagaaaatgttcttcttggcttaggtggtctttatggtgttgctaatgctataccattagctgcatccgctgctccaactccacctcctgatctctcgtcttgtagtatagccaggattaacgaaaatcaggtggtgccgtacagttgttgcgcgcctaagcctgatgatatggagaaaggttccgtattacaagttcccttctatgactaagctccgtgttcgtcagcctgctcattaatgaggagtatattgccaagtacaatctggcgattagtcgaatgagagatcttgataagacacaaccttt

SEQ ID NO: 1010 - DNA, 458 bp, Artificial
  Mutation introduced by TALE nuclease pair POT32_T03 within a POT32 allele
gcaagcttgtgcaatagttgtagtacatccctcaaaactccttttacttcttcctccacttctttaacttccactcctaaaccctctcaacttttcatccatggaaaacgtaaccaaatgttcaaagtttcatgcatggttaccaataataacggtgaccaaaaccaaaacgttgaaacgaattctgttgatcgaagaaatgttcttcttggcttaggtggtctttatggtgttgctaatgctataccattagctgcatccgctactccatctccacctcctgatctctcgtcttgtagtatagccaggattaacgaaactcatgtggtgccgtacagttgttgcgcgcctaagcctgatgatatggagaaagttccgtattacaagttcccttctatgactaagctccgtgttcgtcagcctgctcaagctaatgaggagtatattgccaagtacaa

SEQ ID NO: 1011 - DNA, 516 bp, Artificial
  Mutation introduced by TALE nuclease pair POT32_T03 within a POT32 allele
gcaagcttgtgcaatagtagtagtacatctctcaaaactccttttacttcttcctccacttctttaacttccactcctaagcccctctcaacttttcatccatggaaaacgtaaccaaatgttcaaagtttcatgcaaggttaccaataataacggtgaccaaaaccaaaacgttgaaacgaattctgttgatcgaagaaatgttcttcttggcttaggtggtctttatggtgttgctaatgctataccattagctgcatccgctgctccagctccacctcctgatctctcgtcttgtagtatagccaggattaacgaaaatcaggtggtgccgtacagttgttgcgcgcctaagcctgatgatatggagaaagttccgtattacaagttcccttctatgactaagctccgtgttcgtcagcctgctcatgaatgaggagtatattgccaagtacaatttggcggttagcaagatgagggatcttgataagacacaacctttaaaccctattggtt

SEQ ID NO: 1012 - DNA, 439 bp, Artificial
  Mutation introduced by TALE nuclease pair POT32_T03 within a POT32 allele
gcaagcttgtgcaatagttgtagtacatccctcaaaactccttttacttcttcctccacttctttaacttccactcctaagcccctctcaacttttcatccatggaaaacgtaaccaaatgttcaaagtttcatgcaaggttaccaataataacggtgaccaaaaccaaaacgttgaaacgaattctgttgatcgaagaaatgttcttcttggcttaggtggtctttatggtgttgctaatgctataccattagctgcatccgctgctccagctccacctcctgatctctcgtcttgtagtatagccaggattaacgaaaatcaggtggtgccgtacagttgttgcgcgcctaagcctgatgatatggagaaagttccgtattacaagttcccttctatgactaagctccttgataagacacaacctttaaaccctatt

SEQ ID NO: 1013 - DNA, 501 bp, Artificial
  Mutation introduced by TALE nuclease pair POT32_T03 within a POT32 allele
gcaagcttgtgcaatagtagtagtacatctctcaaaactccttttacttcttcctccacttctttatcttccactcctaagcccctctcaacttttcatccatggaaaacgtaaccaaatgttcaaagtttcatgcaaggttaccaataataacggtgaccaaaaccaaaacgttgaaacaaattctgttgatcgaagaaatgttcttcttggcttaggtggtctttatggtgttgctaatgctataccattagctgcatccgctgctccagctccacctcctgatctctcgtcttgtagtatagccaggattaacgaaaatcaggtggtgccgtacagttgttgcgcgcctaagcctgatgatatggagaaagttccgtattacaagttcccttctatgactaagctccgtgttcgtcagccatgaggagtatattgccaagtacaatctggcgattagtcgaatgaaagatcttgataagacacaacctttaaacccta

SEQ ID NO: 1014 - DNA, 493 bp, Artificial
  Mutation introduced by TALE nuclease pair POT32_T03 within a POT32 allele
gcaagcttgtgcaatagtagtagtacatctctcaaaactccttttacttcttcctccacttctttatcttccactcctaagccctctcaacttttcatccatggaaaacgtaaccaaatgttcaaagtttcatgcaaggttaccaataataacggtgaccaaaaccaaaacgttgaaacgaattctgttgatcgaagaaatgttcttcttggcttaggtggtctttatggtgttgctaatgctataccattagctgcatccgctgctccagctccacctcctgatctctcgtcttgtagtatagccaggattaacgaaaatcaggtggtgccgtacagttgttgcgcgcctaagcctgatgatatggagaaagttccgtattacaagttcccttctatgactaagctccgtgttcgtcagcctgctcaatgaggagtatattgccaagtacaatttggcggttagcaagatgagggatcttgataagacacaa

SEQ ID NO: 1015 - DNA, 445 bp, Artificial
  Mutation introduced by TALE nuclease pair POT32_T03 within a POT32 allele
gcaagcttgtgcaatagtagtagtacatctctcaaaactccttttacttcttcctccacttctttaacttccactcctaagccctctcaacttttcatccatggaaaacgtaaccaaatgttcaaagtttcatgcaaggttaccaataataacggtgaccaaaaccaaaacgttgaaacgaattctgttgatcgaagaaatgttcttcttggcttaggtggtctttatggtgttgctaatgctataccattagctgcatccgctgctccagctccacctcctgatctctcgtcttgtagtatagccaggattaacgaaaatcaggtggtgccgtacagttgttgcgcgcctaagcctgatgatatggagaaagttccgtattacaagttcccttctatgactaagctccgtgttcgtcagcctgctcatatattgccaagtacaa

SEQ ID NO: 1016 - DNA, 478 bp, Artificial
  Mutation introduced by TALE nuclease pair POT32_T03 within a POT32 allele
gcaagcttgtgcaatagttgtagtacatccctcaaaactccttttacttcttcctccacttctttaacttccactcctaaaccctctcaacttttcatccatggaaaacgtaaccaaatgttcaaagtttcatgcatggttaccaataataacggtgaccaaaaccaaaacgttgaaacgaattctgttgatcgaagaaatgttcttcttggcttaggtggtctttatggtgttgctaatgctataccattagctgcatccgctactccatctccacctcctgatctctcgtcttgtagtatagccaggattaacgaaactcatgtggtgccgtacagttgttgcgcgcctaagcctgatgatatggagaaagttccgtattacaagttcccttctatgactaagctccgtgttcgtcagcctgctcaagctaatgaggagtatattgccaagtacaatttggcggttagcaagatga

SEQ ID NO: 1017 - DNA, 495 bp, Artificial
  Mutation introduced by TALE nuclease pair POT32_T03 within a POT32 allele
gcaagcttgtgcaatagtagtagtacatctctcaaaactccttttacttcttcctccacttctttaatcttccactcctaagcccctctcaacttttcatccatggaaaacgtaaccaaatgttcaaagtttcatgcaaggttaccaataataacggtgaccaaaaccaaaacgttgaaacgaaattctgttgatcgaagaaatgttcttcttggcttaggtggtctttatggtgttgctaatgctataccattagctgcatccgctgctccagctccacctcctgatctctcgtcttgtagtatagccaggattaacgaaaatcaggtggtgccgtacagttgttgcgcgcctaagcctgatgatatggagaaagttccgtattacaagttcccttctatgactaagctccgtgttcgtcagcctgctaatgaggagtatattgccaagtacaatctggcgattagtcgaatgaaagatcttgataagacacaa

SEQ ID NO: 1018 - DNA, 479 bp, Artificial
  Mutation introduced by TALE nuclease pair POT32_T03 within a POT32 allele
gcaagcttgtgcaatagtagtagtacatctctcaaaactccttttacttcttcctccacttctttaacttccactcctaagccctctcaacttttcatccatggaaaacgtaaccaaatgttcaaagtttcatgcaaggttaccaataataacggtgaccaaaaccaaaacgttgaaacgaattctgttgatcgaagaaatgttcttcttggcttaggtggtctttatggtgttgctaatgctataccattagctgcatccgctactccatctccacctcctgatctctcgtcttgtagtatagccaggattaacgaaactcatgtggtgccgtacagttgttgcgcgcctaagcctgatgatatggagaaagttccgtattacaagttcccttctatgactaagctccgtgttcgtcagcctgctcatggctaatgaggagtatattgccaagtacaatttggcggttagcaagatga

SEQ ID NO: 1019 - DNA, 443 bp, Artificial
  Mutation introduced by TALE nuclease pair POT32_T03 within a POT32 allele
gcaagcttgtgcaatagttgtagtacatccctcaaaactccttttacttcttcctccacttctttaacttccactcctaagcccctctcaacttttcatccatggaaaacgtaaccaaatgttcaaagtttcatgcaaggttaccaataataacggtgaccaaaaccaaaacgttgaaacgaattctgttgatcgaagaaatgttcttcttggcttaggtggtctttatggtgttgctaatgctataccattagctgcatccgctgctccagctccacctcctgatctctcgtcttgtagtatagccaggattaacgaaaatcaggtggtgccgtacagttgttgcgcgcctaagcctgatgatatggagaaagttccgtattacaagttcccttctatgactaagctccttgataagacacaacctttaaaccctattggtt

SEQ ID NO: 1020 - DNA, 501 bp, Artificial
  Mutation introduced by TALE nuclease pair POT32_T03 within a POT32 allele
gcaagcttgtgcaatagtagtagtacatcctcaatcaaactccttttacttcttcctccacttctttaacttccactcctaagcccctctcaacttttcatccatggaaaacgtaaccaaatgttcaaagtttcatgcaaggttaccaataataacggtgaccaaaaccaaaacgttgaaacgaattctgttgatcgaagaaatgttcttcttggcttaggtggtctttatggtgttgctaatgctataccattagctgcatccgctactccatctccacctcctgatctctcgtcttgtagtatagccaggattaacgaaactcatgtggtgccgtacagttgttgcgcgcctaagcctgatgatatggagaaagttccgtattacaagttcccttctatgactaagctccgtgttcgtcagcctgctcactaatgaggagtatattgccaagtacaatttggcggttagcaagatgagggatcttgataagacacaacc

SEQ ID NO: 1021 - DNA, 490 bp, Artificial
  Mutation introduced by TALE nuclease pair POT32_T03 within a POT32 allele
gcaagcttgtgcaatagttgtagtacatccctcaaaactccttttacttcttcctccacttctttaacttccactcctaaacccctctcaacttttcatccatggaaaacgtaaccaaatgttcaaagtttcatgcatggttaccaataataacggtgaccaaaaccaaaacgttgaaacgaattctgttgatcgaagaaatgttcttcttggcttaggtggtctttatggtgttgctaatgctataccattagctgcatccgctactccatctccacctcctgatctctcgtcttgtagtatagccaggattaacgaaactcatgtggtgccgtacagttgttgcgcgcctaagcctgatgatatggagaaagttccgtattacaagttcccttctatgactaagctccgtgttcgtcagcctgctaatgaggagtatattgccaagtacaatttggcggttagcaagatgaggggatcttgataagac

SEQ ID NO: 1022 - DNA, 462 bp, Artificial
  Mutation introduced by TALE nuclease pair POT32_T03 within a POT32 allele
  misc_feature (385): n is a or c or t or g
gcaagcttgtgcaatagtagtagtacatctctcaaaactccttttacttcttcctccacttctttatcttccactcctaagccctctcaacttttcatccatggaaaacgtaaccaaatgttcaaagtttcatgcaaggttaccaataataacggtgaccaaaaccaaaacgttgaaacgaattctgttgatcgaagaaatgttcttcttggcttaggtggtctttatggtgtcgctaatgctataccattagctgcatccgctactccatctccacctcctgatctctcatcttgtagtaaaagcaaagattaatgaaactacggaggtgccatacagttgttgcgctcccacgcctaaagatatgaagaaagttccatattanaagttcccttctatgactaagctccgtattcgtcccctgctcaatgagagtatattgccaagtacaatttggcggtt

SEQ ID NO: 1023 - DNA, 497 bp, Artificial
  Mutation introduced by TALE nuclease pair POT32_T03 within a POT32 allele
gcaagcttgtgcaatagtagtagtacatctctcaaaactccttttacttcttcctccacttctttatcttccactcctaagcccctctcaacttttcatccatggaaaacgtaaccaaatgttcaaagtttcatgcaaggttaccaataataacggtgaccaaaaccaaaacgttgaaacgaattctgttgatcgaagaaatgttcttcttggcttaggtggtctttatggtgttgctaatgctataccattagctgcatccgctgctccagctccacctcctgatctctcgtcttgtagtatagccaggatttaacgaaaatcaggtggtgccgtacagttgttgcgcgcctaagcctgatgatatggagaaagttccgtattacaagttcccttctatgactaagctccgtgttcgtcagcctgctcaaatgaggagtatattgccaaagtacaatttggcgggttagcaagatgaggggatcttgataagacac

SEQ ID NO: 1024 - DNA, 502 bp, Artificial
  Mutation introduced by TALE nuclease pair POT32_T03 within a POT32 allele
gcaagcttgtgcaatagtagtagtaccactctcaaaactccttttacttcttcctccacttctttatcttccactcctaagcccctctcaacttttcctccatggaaaacgtaacaaaacgttcaaagtttcatgcaaggttaccaataataacggtgaccaaaacgttgaaacgaattctgttgatcgaagaaatgttcttcttggcttaggtggtctttatggtgttgctaatgctataccattagctgcatccgctactccagctccacctcctgatctctcatcttgtagtaaagcaaagattaatgaaactacggaggtgccatacagttgttgcgctcccacgccaaaagatatgaagaaagttccatattacaagttcccttctatgactaagctccgtattcgtcccctgctcataatgaggagtatattgccaagtacaatctggcgattagtcgaatgaaagatcttgataagacacaacctttaaacccta

SEQ ID NO: 1025 - DNA, 493 bp, Artificial
  Mutation introduced by TALE nuclease pair POT32_T03 within a POT32 allele
gcaagcttgtgcaatagtagtagtacatctctcaaaactccttttacttcttcctccacttctttatcttccactcctaagcccctctcaacttttcatccatggaaaacgtaaccaaatgttcaaagtttcatgcaaggttaccaataataacggtgaccaaaaccaaaacgttgaaacaaattctgttgatcgaagaaatgttcttcttggcttaggtggtctttatggtgttgctaatgctataccattagctgcatccgctgctccagctccacctcctgatctctcgtcttgtagtatagccaggattaacgaaaatcaggtggtgccgtacagttgttgcgcgcctaagcctgatgatatggagaaagttccgtattacaagttcccttctatgactaagctccggctaatgaggagtatattgccaagtacaatctggcgattagtcgaatgaaagatcttgataagacacaacctttaaacccta

SEQ ID NO: 1026 - DNA, 455 bp, Artificial
  Mutation introduced by TALE nuclease pair POT32_T03 within a POT32 allele
gcaagcttgtgcaatagtagtagtacatctctcaaaactccttttacttcttcctccacttctttaacttccactcctaaaccgctctcaacttttcatccatggaaaacgtaaccaaatgttcaaagtttcatgcaaggttaccaataataacggtgaccaaaaccaaaacgttgaaacgaattctgttgatcgaagaaatgttcttcttggcttgtggtcgttatgtgttgctatgactataccattagctgcatccgctactccatctccacctcctgatctctcgtcttgtagtatagccaggattaacgaaaactcatgtggtgccgtacagttgttgcgcgcctaagcctgatgatatggagaaagttccgtattacaagttcccttctatgactaagctccgtgttcgtcagcctgctcactaatgaggagtatattgccaagtacaa

SEQ ID NO: 1027 - DNA, 518 bp, Artificial
  Mutation introduced by TALE nuclease pair POT32_T03 within a POT32 allele
  misc_feature (430): n is a or c or t or g
gcaagcttgtgcaatagtagtagtacatctctcaaaactccttttacttcttcctccacttctttaacttccactcctaagcccctctcaacttttcatccatggaaaacgtaaccaaatgttcaaagtttcatgcaaggttaccaataataacggtgaccaaaaccaaaacgttgaaacgaattctgttgatcgaagaaatgttcttcttggcttaggtggtctttatggtgttgctaatgctataccattagctgcatccgctgctccagctccacctcctgatctctcgtcttgtagtatagccaggattaacgaaaatcaggtggtgccgtacagttgttgcgcgcctaagcctgatgatatggagaaagttccgtattacaagttcccttctatgactaagctccgtgttcgtcagcctgctcangataatgaggagtatattgccaagtacaatctggcgattagtcgaatgaaagatcttgataagacacaacctttaaaccctattggtt

SEQ ID NO: 1028 - DNA, 505 bp, Artificial
  Mutation introduced by TALE nuclease pair POT32_T03 within a POT32 allele
gcaagcttgtgcaatagtagtagtacatctctcaaaactccttttacttcttcctccacttctttatcttccactcctaagccctctcaacttttcatccatggaaaacgtaaccaaatgttcaaagtttcatgcaaggttaccaataataacggtgaccaaaaccaaaacgttgaaacaaattctgttgatcgaagaaatgttcttcttggcttaggtggtctttatggtgttgctaatgctataccattagctgcatccgctgctccagctccacctcctgatctctcgtcttgtagtatagccaggattaacgaaaatcaggtggtgccgtacagttgttgcgcgcctaagcctgatgatatggagaaagttccgtattacaagttcccttctatgactaagctccgtgttcgtcagcctgctcatgaggagtatattgccaagtacaatctggcgattagtcgaatgaaagatcttgataagacacaacctttaaacccta

SEQ ID NO: 1029 - DNA, 508 bp, Artificial
  Mutation introduced by TALE nuclease pair POT32_T03 within a POT32 allele
gcaagcttgtgcaatagtagtagtacatctctcaaaactccttttacttcttcctccacttctttatcttccactcctaagcccctctcaacttttcatccatggaaaacgtaaccaaatgttcaaagtttcatgcaaggttatcaataataacggtgaccaaaacgttgaaacgaattctgttgatcgaagaaatgttcttcttggcttaggtggtctttatggtgttgctaatgctataccattagctgcatccgctgctccaactccacctcctgatctctcgtcttgtagtatagccaggattaacgaaaatcaggtggtgccgtacagttgttgcgcgcctaagcctgatgatatggagaaagttccgtattacaagttcccttctatgactaagctccgtgttcgtcagcctgctcagatgaggagtatattgccaagtacaatctggcgattagtcgaatgagagatcttgataagacacaacctttaaaccctattggtt

SEQ ID NO: 1030 - DNA, 496 bp, Artificial
  Mutation introduced by TALE nuclease pair POT32_T03 within a POT32 allele
gcaagcttgtgcaatagtagtagtacatctctcaaaactccttttacttcttcctccacttctttatcttccactcctaagccctctcaacttttcatccatggaaaacgtaaccaaatgttcaaagtttcatgcaaggttaccaataataacggtgaccaaaaccaaaacgttgaaacaaattctgttgatcgaagaaatgttcttcttggcttaggtggtctttatggtgttgctaatgctataccattagctgcatccgctgctccagctccacctcctgatctctcgtcttgtagtatagccaggattaacgaaaatcaggtggtgccgtacagttgttgcgcgcctaagcctgatgatatggagaaagttccgtattacaagttcccttctatgactaagctccgtgttcgtcagcctgctcatattgccaagtacaatctggcgattagtcgaatgaaagatcttgataagacacaacctttaaacccta

SEQ ID NO: 1031 - DNA, 499 bp, Artificial
  Mutation introduced by TALE nuclease pair POT32_T03 within a POT32 allele
gcaagcttgtgcaatagtagtagtaccactctcaaaactccttttacttcttcctccacttctttatcttccactcctaagcccctctcaacttttcctccatggaaaacgtaacaaaacgttcaaagtttcatgcaaggttaccaataataacggtgaccaaaacgttgaaacgaattctgttgatcgaagaaatgttcttcttggcttaggtggtctttatggtgttgctaatgctataccattagctgcatccgctactccagctccacctcctgatctctcatcttgtagtaaagcaaagattaatgaaactacggaggtgccatacagttgttgcgctcccacgccaaaagatatgaagaaagttccatattacaagttcccttctatgactaagctccgtattcgtccccctgctctgaggagtatattgccaagtacaatttggcggttagcaagatgagggatcttgataagacacaacctttaaacccta

SEQ ID NO: 1032 - DNA, 475 bp, Artificial
  Mutation introduced by TALE nuclease pair POT32_T03 within a POT32 allele
gcaagcttgtgcaatagttgtagtacatccctcaaaacatccttttacttcttcctccacttctttaacttccactcctaaaccctctcaacttttcatccatggaaaacgtaaccaaatgttcaaagtttcatgcaaggttaccaataataacggtgaccaaaaccaaaacgttgaaacgaattctgttgatcgaagaaatgttcttcttggcttaggtggtctttatggtgttgctaatgctataccattagctgcatccgctactccatctccacctcctgatctctcgtcttgtagtatagccaggattaacgaaactcatgtggtgccgtacagttgttgcgcgcctaagcctgatgatatggagaaagttccgtattacaagttcccttctatgactaagctccgtgttcgtcagcctgctcaaatgaggagtatattgccaagtacaatttggcggttagcaagatga

SEQ ID NO: 1033 - DNA, 497 bp, Artificial
  Mutation introduced by TALE nuclease pair POT32_T03 within a POT32 allele
gcaagcttgtgcaatagtagtagtacatctctcaaaactccttttacttcttcctccacttctttatcttccactcctaagcccctctcaacttttcatccatggaaaacgtaaccaaatgttcaaagtttcatgcaaggttaccaataataacggtgaccaaaaccaaaacgttgaaacaaattctgttgatcgaagaaatgttcttcttggcttaggtggtctttatggtgttgctaatgctataccattagctgcatccgctgctccagctccacctcctgatctctcgtcttgtagtatagccaggattaacgaaaatcaggtggtgccgtacagttgttgcgcgcctaagcctgatgatatggagaaagttccgtattacaagttcccttctatgactaagctccgtgttcgtcagcctgctcatattgccaagtacaatctggcgattagtcgaatgaaagatcttgataagacacaacctttaaacccta

SEQ ID NO: 1034 - DNA, 508 bp, Artificial
  Mutation introduced by TALE nuclease pair POT32_T03 within a POT32 allele
gcaagcttgtgcaatagtagtagtacatctctcaaaactccttttacttcttcctccacttctttatcttccactcctaagcccctctcaacttttcatccatggaaaacgtaaccaaatgttcaaagtttcatgcaaggttatcaataataacggtgaccaaaacgttgaaacgaattctgttgatcgaagaaatgttcttcttggcttaggtggtctttatggtgttgctaatgctataccattagctgcatccgctgctccaactccacctcctgatctctcgtcttgtagtatagccaggattaacgaaaatcaggtggtgccgtacagttgttgcgcgcctaagcctgatgatatggagaaagttccgtattacaagttcccttctatgactaagctccgtgttcgtcagcctgctctaatgaggagtatattgccaagtacaatctggcgattagtcgaatgagagatcttgataagacacaacctttaaaccctattggtt

SEQ ID NO: 1035 - DNA, 513 bp, Artificial
  Mutation introduced by TALE nuclease pair POT32_T03 within a POT32 allele
  misc_feature (425): n is a or c or t or g
gcaagcttgtgcaatagtagtagtacatctctcaaaactccttttacttcttcctccacttctttatcttccactcctaagcccctctcaacttttcatccatggaaaacgtaaccaaatgttcaaagtttcatgcaaggttatcaataataacggtgaccaaaacgttgaaacgaattctgttgatcgaagaaatgttcttcttggcttaggtggtctttatggtgttgctaatgctataccattagctgcatccgctgctccaactccacctcctgatctctcgtcttgtagtatagccaggattaacgaaaatcaggtggtgccgtacagttgttgcgcgcctaagcctgatgatatggagaaagttccgtattacaagttcccttctatgactaagctccgtgttcgtcagcctgctcagngataatgaggagtatattgccaagtacaatctggcgattagtcgaatgagagatcttgataagacacaacctttaaaccctattggtt

SEQ ID NO: 1036 - DNA, 510 bp, Artificial
  Mutation introduced by TALE nuclease pair POT32_T03 within a POT32 allele
gcaagcttgtgcaatagtagtagtacatctctcaaaactccttttacttcttcctccacttctttatcttccactcctaagcccctctcaacttttcatccatggaaaacgtaaccaaatgttcaaagtttcatgcaaggttaccaataataacggtgaccaaaaccaaaacgttgaaacaaattctgttgatcgaagaaatgttcttcttggcttaggtggtctttatggtgttgctaatgctataccattagctgcatccgctgctccagctccacctcctgatctctcgtcttgtagtatagccaggattaacgaaaatcaggtggtgccgtacagttgttgcgcgcctaagcctgatgatatggagaaagttccgtattacaagttcccttctatgactaagctccgtgttcgtcagcctgctcacataatgaggagtatattgccaagtacaatctggcgattagtcgaatgaaagatcttgataagacacaacctttaaaccct

SEQ ID NO: 1037 - DNA, 516 bp, Artificial
  Mutation introduced by TALE nuclease pair POT32_T03 within a POT32 allele
gcaagcttgtgcaatagtagtagtacatctctcaaaactccttttacttcttcctccacttctttatcttccactcctaagccctctcaacttttcatccatggaaaacgtaaccaaatgttcaaagtttcatgcaaggttaccaataataacggtgaccaaaaccaaaacgttgaaacaaattctgttgatcgaagaaatgttcttcttggcttaggtggtctttatggtgttgctaatgctataccattagctgcatccgctgctccagctccacctcctgatctctcgtcttgtagtatagccaggattaacgaaaatcaggtggtgccgtacagttgttgcgcgcctaagcctgatgatatggagaaagttccgtattacaagttcccttctatgactaagctccgtgttcgtcagcctgctcagctaatgaggagtatattgccaagtacaatctggcgattagtcgaatgaaagatcttgataagacacaacctttaaaccctattggtt

SEQ ID NO: 1038 - DNA, 493 bp, Artificial
  Mutation introduced by TALE nuclease pair POT32_T03 within a POT32 allele
gcaagcttgtgcaatagttgtagtacatctctcaaaactccttttacttcttcctccacttctttaacttccactcctaaaccctctcaacttttcatccatggaaaacgtaaccaaatgttcaaagtttcatgcaaggttaccaataataacggtgaccaaaaccaaaacgttgaaacgaattctgttgatcgaagaaatgttcttcttggcttaggtggtctttatggtgttgctaatgctataccattagctgcatccgctactccatctccacctcctgatctctcgtcttgtagtatagccaggattaacgaaactcatgtggtgccgtacagttgttgcgcgcctaagcctgatgatatggagaaagttccgtattacaagttcccttctatgactaagctccgtgttcgtcagcctgctcatgaggagtatattgccaagtacaatttggcggttagcaagatgaggggatcttgataagacacaa

SEQ ID NO: 1039 - DNA, 464 bp, Artificial
  Mutation introduced by TALE nuclease pair POT32_T03 within a POT32 allele
gcaagcttgtgcaatagtagtagtacatctctcaaaactccttttacttcttcctccacttctttaacttccactcctaagcccctctcaacttttcatccatggaaaacgtaaccaaatgttcaaagtttcatgcaaggttaccaataataacggtgaccaaaaccaaaacgttgaaacgaattctgttgatcgaagaaatgttcttcttggcttaggtggtctttatggtgttgctaatgctataccattagctgcatccgctgctccagctccacctcctgatctctcgtcttgtagtatagccaggattaacgaaaatcaggtggtgccgtacagttgttgcgcgcctaagcctgatgatatggagaaagttccgtattacaagttcccttctatgactaagctccgtgttcgtcagcctgctcatgataatgaggagtatattgccaagtacaattgcg

SEQ ID NO: 1040 - DNA, 541 bp, Artificial
  Mutation introduced by TALE nuclease pair POT32_T03 within a POT32 allele
gcaagcttgtgcaatagttgtagtacatccctcaaaacatccttttacttcttcctccacttctttaacttccactcctaaaccctctcaacttttcatccatggaaaacgtaaccaaatgttcaaagtttcatgcatggttaccaataataacggtgaccaaaaccaaaacgttgaaacgaattctgttgatcgaagaaatgttcttcttggcttaggtggtctttatggtgttgctaatgctataccattagctgcatccgctactccatctccacctcctgatctctcgtcttgtagtatagccaggattaacgaaactcatgtggtgccgtacagttgttgcgcgcctaagcctgatgatatggagaaagttccgtattacaagttcccttctatgactaagctccgtgttcgtcagcctgctcatatgaggagtatattgccaagtacaatttggcggttagcaagatgaggggatcttgataagacacaacctttaaaccctattggttctgagacgccaaggcacacaggggat

SEQ ID NO: 1041 - DNA, 514 bp, Artificial
  Mutation introduced by TALE nuclease pair POT32_T03 within a POT32 allele
gcaagcttgtgcaatagttgtagtacatccctcaaaactccttttacttcttcctccacttctttaacttccactcctaaaccctctcaacttttcatccatggaaaacgtaaccaaatgttcaaagtttcatgcatggttaccaataataacggtgaccaaaaccaaaacgttgaaacgaattctgttgatcgaagaaatgttcttcttggcttaggtggtctttatggtgttgctaatgctataccattagctgcatccgctactccatctccacctcctgatctctcgtcttgtagtatagccaggattaacgaaactcatgtggtgccgtacagttgttgcgcgcctaagcctgatgatatggagaaagttccgtattacaagttcccttctatgactaagctccgtgttcgtcagcgaagctaatgaggagtatattgtcaagtacaattttggcggttagcaagatgaggggatcttgataagacacaacctttaaaccctattggtt

SEQ ID NO: 1042 - DNA, 495 bp, Artificial
  Mutation introduced by TALE nuclease pair POT32_T03 within a POT32 allele
gcaagcttgtgcaatagtagtagtacatctctcaaaactccttttacttcttcctccacttctttatcttccatcctctaagcccctctcaacttttcatccatggaaaacgtaaccaaatgttcaaagtttcatgcaaggttaccaataataacggtgaccaaaaccaaaacgttgaaacaaattctgttgatcgaagaaatgttcttcttggcttaggtggtctttatggtgttgctaatgctataccattagctgcatccgctgctccagctccacctcctgatctctcgtcttgtagtatagccaggattaacgaaaatcaggtggtgccgtacagttgttgcgcgcctaagcctgatgatgtggagaaagttccgtattacaagttcccttctatgactaagctccgtgttcgtcaggagtatattgccaagtacaatctggcgattagtcgaatgaaagatcttgataagacacaacctttaaacccta

SEQ ID NO: 1043 - DNA, 477 bp, Artificial
  Mutation introduced by TALE nuclease pair POT32_T03 within a POT32 allele
  misc_feature (152); (155): n is a or c or t or g
gcaagcttgtgcaatagtagtagtacatctctcaaaactccttttacttcttcctccacttctttaacttccactcctaagcccctctcaacttttcatccatggaaaacgtaaccaaatgttcaaagtttcatgcaaggttacataataanagnggctaaaccaaaacgttgaaacgaattctgttgatcgaagaaatgttcttcttggcttaggtggtctttatggtgttgctaatgctataccattagctgcatccgctgctccaactccacctcctgatctctcgtcttgtagtatagccaggattaacgaaaatcaggtggtgccgtacagttgttgcgcgcctaagcctgatgatatggagaaagttccgtattacaagttcccttctatgactaagctccgtgttcgtcagcctgctcataatagaggagtatattgccaagtacaatctggcgattagtcgaatgaaga

SEQ ID NO: 1044 - DNA, 510 bp, Artificial
  Mutation introduced by TALE nuclease pair POT32_T03 within a POT32 allele
gcaagcttgtgcaatagtagtagtacatctctcaaaaactccttttacttcttcctccacttctttatcttccactcctaagcccctctcaacttttcatccatggaaaacgtaaccaaatgttcaaagtttcatgcaaggttatcaataataacggtgaccaaaacgttgaaacgaattctgttgatcgaagaaatgttcttcttggcttaggtggtctttatggtgttgctaatgctataccattagctgcatccgctgctccaactccacctcctgatctctcgtcttgtagtatagccaggattaacgaaaatcaggtggtgccgtacagttgttgcgcgcctaagcctgatgatatggagaaagttccgtattacaagttcccttctatgactaagctccgtgttcgtcagcctgctcataatgaggagtatattgccaagtacaatctggcgattagtcgaatgagagatcttgataagacacaacctttaaaccctattggtt

SEQ ID NO: 1045 - DNA, 515 bp, Artificial
  Mutation introduced by TALE nuclease pair POT32_T03 within a POT32 allele
gcaagcttgtgcaatagtgtagtacatcctcaacaatccttttacttcttcctccacttctttaacttccactcctaaccgcctctcaacttttcatccatggaaaacgtaaccaaatgttcaaagtttcatgcaaggttaccaataataacggtgaccaaaaccaaaacgttgaaacgaattctgttgatcgaagaaatgttcttcttggcttaggtggtctttatggtgttgctaatgctataccattagctgcatccgctgctccagctccacctcctgatctctcgtcttgtagtatagccaggattaacgaaaatcaggtggtgccgtacagttgttgcgcgcctaagcctgatgatatggagaaagttccgtattacaagttcccttctatgactaagctccgtgttcgtcagcctgctcatgtaatgaggagtatattgccaagtacaatctggcgattagtcgaatgagagatcttgataagacacaacctttaaaccctattggtt

SEQ ID NO: 1046 - DNA, 514 bp, Artificial
  Mutation introduced by TALE nuclease pair POT32_T03 within a POT32 allele
gcaagcttgtgcaatagtagtagtacatctctcaaaactccttttacttcttcctccacttctttaacttccactcctaagccctctcaacttttcatccatggaaaacgtaaccaaatgttcaaagtttcatgcaaggttaccaataataacggtgaccaaaaccaaaacgttgaaacgaattctgttgatcgaagaaatgttcttcttggcttaggtggtctttatggtgttgctaatgctataccattagctgcatccgctgctccagctccacctcctgatctctcgtcttgtagtatagccaggattaacgaaaatcaggtggtgccgtacagttgttgcgcgcctaagcctgatgatatggagaaagttccgtattacaagttcccttctatgactaagctccgtgttcgtcagcctgctcataatgaggagtatattgccaagtacaatctggcgattagtcgaatgaaagatcttgataagacacaacctttaaaccctattggtt

SEQ ID NO: 1047 - DNA, 517 bp, Artificial
  Mutation introduced by TALE nuclease pair POT32_T03 within a POT32 allele
gcaagcttgtgcaatagttgtagtacatctctcaaaactccttttacttcttcctccacttctttaacttccactcctaaaccctctcaacttttcatccatggaaaacgtaaccaaatgttcaaagtttcatgcaaggttaccaataataacggtgaccaaaaccaaaacgttgaaacgaattctgttgatcgaagaaatgttcttcttggcttaggtggtctttatggtgttgctaatgctataccattagctgcatccgctgctccagctccacctcctgatctctcgtcttgtagtatagccaggattaacgaaaactcaggtggtgccgtacagttgttgcgcgcctaagcctgatgatatggagaaagttccgtattacaagttcccttctatgactaagctccgtgttcgtcagcctgctcatctaatgaggagtatattgccaagtacaatctggcgattagtcgaatgaaagatcttgataagacacaacctttaaaccctattggtt

SEQ ID NO: 1048 - DNA, 514 bp, Artificial
  Mutation introduced by TALE nuclease pair POT32_T03 within a POT32 allele
gcaagcttgtgcaatagttgtagtacatccctcaaaactccttttacttcttcctccacttctttaacttccactcctaaaccctctcaacttttcatccatggaaaacgtaaccaaatgttcaaagtttcatgcatggttaccaataataacggtgaccaaaaccaaaacgttgaaacgaattctgttgatcgaagaaatgttcttcttggcttaggtggtctttatggtgttgctaatgctataccattagctgcatccgctactccatctccacctcctgatctctcgtcttgtagtatagccaggattaacgaaactcatgtggtgccgtacagttgttgcgcgcctaagcctgatgatatggagaaagttccgtattacaagttcccttctatgactaagctccgtgttcgtcagcctgctcataatgaggagtatattgccaagtacaatctggcgattagtcgaatgaaagatcttgataagacacaacctttaaaccctattggtt

SEQ ID NO: 1049 - DNA, 480 bp, Artificial
  Mutation introduced by TALE nuclease pair POT32_T03 within a POT32 allele
gcaagcttgtgcaatagtagtagtacatctctcaaaactccttttactttcttcctccacttctttatcttccactcctaagccctctcaacttttcatccatggaaaacgtaaccaaatgttcaaagtttcatgcaaggttaccaataataacggtgaccaaaaccaaaacgttgaaacgaattctgttgatcgaagaaatgttcttcttggcttaggtggtctttatggtgttgctaatgctataccattagctgcatccgctgctccagctccacctcctgatctctcgtcttgtagtatagccaggattaacgaaaatcaggtggtgccgtacagttgttgcgcgcctaagcctgatgatatggagaaagttccgtattacaagttcccttctatgactaagctccgtgttcgtcagcctgctcagctaatgaggagtatattgccaagtacaattttgggcgggttagcaagatg

SEQ ID NO: 1050 - DNA, 514 bp, Artificial
  Mutation introduced by TALE nuclease pair POT32_T03 within a POT32 allele
gcaagcttgtgcaatagtagtagtacatctctcaaaactccttttacttcttcctccacttctttatcttccactcctaagcccctctcaacttttcatccatggaaaacgtaaccaaatgttcaaagtttcatgcaaggttatcaataataacggtgaccaaaacgttgaaacgaattctgttgatcgaagaaatgttcttcttggcttaggtggtctttatggtgttgctaatgctataccattagctgcatccgctgctccaactccacctcctgatctctcgtcttgtagtatagtccaggattaacgaaaatcaggtggtgccgtacagttgttgcgcgcctaagcctgatgatatggagaaagttccgtattacaagttcccttctatgactaagctccgtgttcgtcagcctgctcagtgataatgaggagtatattgccaagtacaatctggcgattagtcgaatgagagatcttgataagacacaacctttaaaccctattggtt

SEQ ID NO: 1051 - DNA, 498 bp, Artificial
  Mutation introduced by TALE nuclease pair POT32_T03 within a POT32 allele
gcaagcttgtgcaatagttgtagtacatccctcaaaactccttttacttcttcctccacttctttaacttccactcctaaaccctctcaacttttcatccatggaaaacgtaaccaaatgttcaaagtttcatgcatggttaccaataataacggtgaccaaaaccaaaacgttgaaacgaattctgttgatcgaagaaaatgttcttcttggcttaggtggtctttatggtgttgctaatgctataccattagctgcatccgctactccatctccacctcctgatctctcgtcttgtagtatagccaggattaacgaaactcatgtggtgccgtacagttgttgcgcgcctaagcctgatgatatggagaaagttccgtattacaagttcccttctatgactaagctccgtgttcgtcagccaggagtatattgccaagtacaatttggcggttagcaagatgagggatcttgataagacacaacctttaaacccta

SEQ ID NO: 1052 - DNA, 511 bp, Artificial
  Mutation introduced by TALE nuclease pair POT32_T03 within a POT32 allele
  misc_feature (430): n is a or c or t or g
gcaagcttgtgcaatagtagtagtacatctctcaaaactccttttacttcttcctccacttctttatcttccactcctaagccctctcaacttttcatccatggaaaacgtaaccaaatgttcaaagtttcatgcaaggttaccaataataacggtgaccaaaaccaaaacgttgaaacaaattctgttgatcgaagaaatgttcttcttggcttaggtggtctttatggtgttgctaatgctataccattagctgcatccgctgctccagctccacctcctgatctctcgtcttgtagtatagccaggattaacgaaaatcaggtggtgccgtacagttgttgcgcgcctaagcctgatgatatggagaaagttccgtattacaagttcccttctatgactaagctccgtgttcgtcagcctgctcatnataatgaggagtatattgccaagtacaatctggcgattagtcgaatgaaagatcttgataagacacaacctttaaacccta

SEQ ID NO: 1053 - DNA, 514 bp, Artificial
  Mutation introduced by TALE nuclease pair POT32_T03 within a POT32 allele
gcaagcttgtgcaatagtagtagtacatctctcaaaactccttttacttcttcctccacttctttatcttccactcctaagcccctctcaacttttcatccatggaaaacgtaaccaaatgttcaaagtttcatgcaaggttaccaataataacggtgaccaaaaccaaaacgttgaaacgaattctgttgatcgaagaaatgttcttcttggcttaggtggtctttatggtgttgctaatgctataccattagctgcatccgctgctccagctccacctcctgatctctcgtcttgtagtatagccaggattaacgaaaatcaggtggtgccgtacagttgttgcgcgcctaagcctgatgatatggagaaagttccgtattacaagttcccttctatgactaagctccgtgttcgtcagcctcagctaatgaggagtatattgccaagtacaatttggcggttagcaagatgagggatcttgataagacacaacctttaaaccctattggtt

SEQ ID NO: 1054 - DNA, 517 bp, Artificial
  Mutation introduced by TALE nuclease pair POT32_T03 within a POT32 allele
gcaagcttgtgcaatagttgtagtacatctctcaaaactccttttacttcttcctccacttctttaacttccactcctaaaccctctcaacttttcatccatggaaaacgtaaccaaatgttcaaagtttcatgcaaggttaccaataataacggtgaccaaaaccaaaacgttgaaacgaattctgttgatcgaagaaatgttcttcttggcttaggtggtctttatggtgttgctaatgctataccattagctgcatccgctgctccagctccacctcctgatctctcgtcttgtagtatagccaggattaacgaaaatcaggtggtgccgtacagttgttgcgcgcctaagcctgatgatatggagaaagttccgtattacaagttcccttctatgactaagctccgtgttcgtcagcctgctcactaatgaggagtatattgccaagtacaatttggcggttagcaagatgaggggatcttgataagacacaaccttttaaaccctattggtt

SEQ ID NO: 1055 - DNA, 515 bp, Artificial
  Mutation introduced by TALE nuclease pair POT32_T03 within a POT32 allele
gcaagcttgtgcaatagtagtagtacatctctcaaaactccttttacttcttcctccacttctttaacttccactcctaagcccctctcaacttttcatccatggaaaacgtaaccaaatgttcaaagtttcatgcaaggttaccaataataacggtgaccaaaaccaaaacgttgaaacgaattctgttgatcgaagaaatgttcttcttggcttaggtggtctttatggtgttgctaatgctataccattagctgcatccgctgctccagctccacctcctgatctctcgtcttgtagtatagccaggattaacgaaaatcaggtggtgccgtacagttgttgcgcgcctaagcctgatgatatggagaaagttccgtattacaagttcccttctatgactaagctccgtgttcgtcagcctgctactaatgaggagtatattgccaagtacaatctggcgattagtcgaatgaaagatcttgataagacacaacctttaaaccctattggtt

SEQ ID NO: 1056 - DNA, 510 bp, Artificial
  Mutation introduced by TALE nuclease pair POT32_T03 within a POT32 allele
gcaagcttgtgcaatagttgtagtacatccctcaaaactccttttacttcttcctccacttctttatcttccactcctaagcccctctcaacttttcatccatggaaaacgtaaccaaatgttcaaagtttcatgcaaggttatcaataataacggtgaccaaaacgttgaaacgaattctgttgatcgaagaaatgttcttcttggcttaggtggtctttatggtgttgctaatgctataccattagctgcatccgctgctccaactccacctcctgatctctcgtcttgtagtatagccaggattaacgaaaatcaggtggtgccgtacagttgttgcgcgcctaagcctgatgatatggagaaagttccgtattacaagttcccttctatgactaagctccgtgttcgtcagcctgctcactaatgaggagtatattgccaagtacaatctggcgattagtcgaatgaaagatcttgataagacacaacctttaaaccctattggtt

SEQ ID NO: 1057 - DNA, 506 bp, Artificial
  Mutation introduced by TALE nuclease pair POT32_T03 within a POT32 allele
gcaagcttgtgcaatagtagtagtacatctctcaaaactccttttacttcttcctccacttctttatcttccactcctaagcccctctcaacttttcatccatggaaaacgtaaccaaatgttcaaagtttcatgcaaggttaccaataataacggtgaccaaaaccaaaacgttgaaacaaattctgttgatcgaagaaatgttcttcttggcttaggtggtctttatggtgttgctaatgctataccattagctgcatccgctgctccagctccacctcctgatctctcgtcttgtagtatagccaggattaacgaaaatcaggtggtgccgtacagttgttgcgcgcctaagcctgatgatatggataaagttccgtattacaagttcccttctatgactaagctccgtgttcgtcagcctgctaatgaggagtatattgccaagtacaatctggcgattagtcgaatgaaagatcttgataagacacaacctttaaacccta

SEQ ID NO: 1058 - DNA, 459 bp, Artificial
  Mutation introduced by TALE nuclease pair POT32_T03 within a POT32 allele
gcaagcttgtgcaatagtagtagtacatctctcaaaactccttttacttcttcctccacttctttaacttccactcctaagcccctctcaacttttcatccatggaaaacgtaaccaaatgttcaaagtttcatgcaaggttaccaataataacggtgaccaaaaccaaaacgttgaaacgaattctgttgatcgaagaaatgttcttcttggcttaggtggtctttatggtgttgctaatgctataccattagctgcatccgctgctccagctccacctcctgatctctcgtcttgtagtatagccaggattaacgaaaatcaggtggtgccgtacagttgttgcgcgcctaagcctgatgatatggagaaagttccgtattacaagttcccttctatgactaagctccgtgttcgtcagcctgctcatgaagagtatattgccaagtacaatttggc

SEQ ID NO: 1059 - DNA, 471 bp, Artificial
  Mutation introduced by TALE nuclease pair POT32_T03 within a POT32 allele
gcaagcttgtgcaatagtagtagtacccactctcaaaactccttttacttcttcctccacttctttatcttccactcctaagcccctctcaacttttcctccatggaaaacgtaacaaaacgttcaaagtttcatgcaaggttaccaataataacggtgaccaaaaccaaaacgttgaaacgaattctgttgatcgaagaaatgttcttcttggcttaggtggtctttatggtgttgctaatgctataccattagctgcatccgctactccatctccacctcctgatctctcatcttgtagtaaagcaaagattaatgaaactacggaggtgccatacagttgttgcgctcccacgcctaaagatatgaagaaagttcctattacaagttcccttcatgactaagctccgtattcgtccccatctaatgaggagtatattgccaagtacaatttggcggttagcaagatga

SEQ ID NO: 1060 - DNA, 501 bp, Artificial
  Mutation introduced by TALE nuclease pair POT32_T03 within a POT32 allele
gcaagcttgtgcaatagttgtagtacatccctcaaaactccttttacttcttcctccacttctttaacttccactcctaaaccctctcaacttttcatccatggaaaacgtaaccaaatgttcaaagtttcatgcatggttaccaataataacggtgaccaaaaccaaaacgttgaaacgaattctgttgatcgaagaaatgttcttcttggcttaggtggtctttatggtgttgctaatgctataccattagctgcatccgctactccatctccacctcctgatctctcgtcttgtagtatagccaggattaacgaaactcatgtggtgccgtacagttgttgcgcgcctaagcctgatgatatggagaaagttccgtattacaagttcccttctatgactaagctccgtgttcgtcagccaatgaggagtatattgccaagtacaatttggcggttagcaagatgagggatcttgataagacacaacctttaaacccta

SEQ ID NO: 1061 - DNA, 494 bp, Artificial
  Mutation introduced by TALE nuclease pair POT32_T03 within a POT32 allele
  misc_feature (433): n is a or c or t or g
gcaagcttgtgcaatagtagtagtaccactctcaaaactccttttacttcttcctccacttctttatcttccactcctaagccctctcaacttttcctccatggaaaacgtaacaaaacgttcaaagtttcatgcaaggttaccaataataacggtgaccaaaaccaaaacgttgaaacgaattctgttgatcgaagaaatgttcttcttggcttaggtggtctttatggtgttgctaatgctataccattagctgcatccgctactccatctccacctcctgatctctcatcttgtagtaaagcaaagattaatgaaactacggaggtgccattacagttgttgcgctcccacgcctaaaagatatgaagaaagttccatatttacaaagttcccttctatgactaagctccgtattcgtcccatctaatgnggagtatattgccaagtacaatttggcggttagcaagatgagggatcttgataagacacaa

SEQ ID NO: 1062 - DNA, 514 bp, Artificial
  Mutation introduced by TALE nuclease pair POT32_T03 within a POT32 allele
gcaagcttgtgcaatagttgtagtacatccctcaaaactccttttacttcttcctccacttctttaacttccactcctaaaccctctcaacttttcatccatggaaaacgtaaccaaatgttcaaagtttcatgcatggttaccaataataacggtgaccaaaaccaaaacgttgaaacgaattctgttgatcgaagaaatgttcttcttggcttaggtggtctttatggtgttgctaatgctataccattagctgcatccgctactccatctccacctcctgatctctcgtcttgtagtatagccaggattaacgaaactcatgtggtgccgtacagttgttgcgcgcctaagcctgatgatatggagaaagttccgtattacaagttcccttctatgactaagctccgtgttcgtcagcctgctcataatgaggagtatattgccaagtacaatttggcggttagcaagatgagggatcttgataagacacaacctttaaaccctattggtt

SEQ ID NO: 1063 - DNA, 510 bp, Artificial
  Mutation introduced by TALE nuclease pair POT32_T03 within a POT32 allele
gcaagcttgtgcaatagtagtagtacatctctcaaaactccttttacttcttcctccacttctttaacttccactcctaagcccctctcaacttttcatccatggaaaacgtaaccaaatgttcaaagtttcatgcaaggttatcaataataacggtgaccaaaacgttgaaacgaattctgttgatcgaagaaatgttcttcttggcttaggtggtctttatggtgttgctaatgctataccattagctgcatccgctgctccaactccacctcctgatctctcgtcttgtagtatagccaggattaacgaaaatcaggtggtgccgtacagttgttgcgcgcctaagcctgatgatatggagaaagttccgtattacaagttcccttctatgactaagctccgtgttcgtcagcctgctcactaatgaggagtatattgccaagtacaatctggcgattagtcgaatgaaagatcttgataagacacaacctttaaaccctattggtt

SEQ ID NO: 1064 - DNA, 515 bp, Artificial
  Mutation introduced by TALE nuclease pair POT32_T03 within a POT32 allele
gcaagcttgtgcaatagtgtagtacatcctcaacaatccttttacttcttcctccacttctttaacttccactcctaaccgcctctcaacttttcatccatggaaaacgtaaccaaatgttcaaagtttcatgcaaggttaccaataataacggtgaccaaaaccaaaacgttgaaacgaattctgttgatcgaagaaatgttcttcttggcttaggtggtctttatggtgttgctaatgctataccattagctgcatccgctgctccagctccacctcctgatctctcgtcttgtagtatagccaggattaacgaaaatcaggtggtgccgtacagttgttgcgcgcctaagcctgatgatatggagaaagttccgtattacaagttcccttctatgactaagctccgtgttcgtcagcctgctcatagatagaggagtatattgccaagtacaatttggcggttagcaagatgagggatcttgataagacacaacctttaaatcctattggtt

SEQ ID NO: 1065 - DNA, 475 bp, Artificial
  Mutation introduced by TALE nuclease pair POT32_T03 within a POT32 allele
gcaagcttgtgcaatagtagtagtacatctctcaaaactccttttacttcttcctccacttctttatcttccactcctaagcccctctcaacttttcatccatggaaaacgtaaccaaatgttcaaagtttcatgcaaggttaccaataataacggtgaccaaaaccaaaacgttgaaacaaattctgttgatcgaagaaatgttcttcttggcttaggtggtctttatggtgttgctaatgctataccattagctgcatccgctgctccagctccacctcctgatctctcgtcttgtagtatagccaggattaacgaaaatcaggtggtgccgtacagttgttgcgcgcctaagcctgatgatatggagaaagttccgtattacaagttcccttctatgactaagctccgtgttcgtcagcctgctcaaatgaggagtatattgccaagtacaatttggcggttagcaagatga

SEQ ID NO: 1066 - DNA, 476 bp, Artificial
  Mutation introduced by TALE nuclease pair POT32_T03 within a POT32 allele
gcaagcttgtgcaatagtagtagtacatcctcaatcaatccttttacttcttcctccacttctttaacttccactcctaagccctctcaacttttcatccatggaaaacgtaaccaaatgttcaaagtttcatgcaaggttaccaataataacggtgaccaaaaccaaaacgttgaaacgaattctgttgatcgaagaaatgttcttcttggcttaggtggtctttatggtgttgctaatgctataccattagctgcatccgctactccatctccacctcctgatctctcgtcttgtagtatagccaggattaacgaaactcatgtggtgccgtacagttgttgcgcgcctaagcctgatgatatggagaaagttccgtattacaagttcccttctatgactaagctccgtgttcgtcagcctgctcactaatgaggagtatattgccaagtacaatttggcggttagcaagatga

SEQ ID NO: 1067 - DNA, 514 bp, Artificial
  Mutation introduced by TALE nuclease pair POT32_T03 within a POT32 allele
gcaagcttgtgcaatagttgtagtacatctctcaaaactccttttacttcttcctccacttctttaacttccactcctaaaccctctcaacttttcatccatggaaaacgtaaccaaatgttcaaagtttcatgcaaggttaccaataataacggtgaccaaaaccaaaacgttgaaacgaattctgttgatcgaagaaatgttcttcttggcttaggtggtctttatggtgttgctaatgctataccattagctgcatccgctgctccagtccacctcctgatctctcgtcttgtagtatagccaggattaacgaaaatcaggtggtgccgtacagttgttgcgcgcctaagcctgatgatatggagaaagttccgtattacaagttcccttctatgactaagctccgtgttcgtcagcctgctcatagatagaggagtatattgccaagtacaatctggcgattagtcgaatgaagatcttgataagacacaacctttaaaccctattggtt

SEQ ID NO: 1068 - DNA, 507 bp, Artificial
  Mutation introduced by TALE nuclease pair POT32_T03 within a POT32 allele
gcaagcttgtgcaatagtagtagtacatctctcaaaactccttttacttcttcctccacttctttaacttccactcctaagccctctcaacttttcatccatggaaaacgtaaccaaatgttcaaagtttcatgcaaggttaccaataataacggtgaccaaaaccaaaacgttgaaacgaattctgttgatcgaagaaatgttcttcttggcttaggtggtctttatggtgttgctaatgctataccattagctgcatccgctgctccagctccacctcctgatctctcgtcttgtagtatagccaggattaacgaaaatcaggtggtgccgtacagttgttgcgcgcctaagcctgatgatatggagaaagttccgtattacaagttcccttctatgactaagctccgtgttcgtcagcctgctcaaatgaggagtatattgccaagtacaatctggcgattagtcgaatgagagatcttgataagacacaacctttaaacccta

SEQ ID NO: 1069 - DNA, 491 bp, Artificial
  Mutation introduced by TALE nuclease pair POT32_T03 within a POT32 allele
gaagcttgtgcaatagtagtagtacatctctcaaaactccttttacttcttcctccacttctttatcttccactcctaagcccctctcaacttttcatccatggaaaacgtaaccaaatgttcaaagtttcatgcaaggttaccaataataacggtgaccaaaaccaaaacgttgaaacaaattctgttgatcgaagaaatgttcttcttggcttaggtggtctttatggtgttgctaatgctataccattagctgcatccgctgctccagctccacctcctgatctctcgtcttgtagtatagccaggattaacgaaaatcaggtggtgccgtacagttgttgcgcgcctaagcctgatgatatggagaaagttccgtattacaagttcccttctatgactaagctccgtgttcgaggagtatattgccaagtacaatttggcggttagcaagatgagggatcttgataagacacaacctttaaacccta

SEQ ID NO: 1070 - DNA, 512 bp, Artificial
  Mutation introduced by TALE nuclease pair POT32_T03 within a POT32 allele
gcaagcttgtgcaatagttgtagtacatccctcaaacatccttttacttcttcctccacttctttaacttccactcctaaaccctctcaacttttcatccatggaaaacgtaaccaaatgttcaaagtttcatgcatggttaccaataataacggtgaccaaaaccaaaacgttgaaacgaattctgttgatcgaagaaatgttcttcttggcttaggtggtctttatggtgttgctaatgctataccattagctgcatccgctactccatctccacctcctgatctctcgtcttgtagtatagccaggattaacgaaactcatgtggtgccgtacagttgttgcgcgcctaagcctgatgatatggagaaagttccgtattacaagttcccttctatgactaagctccgtgttcgtcagcgaagctaatgaggagtatattgtcaagtacaatttggcggttagcaagatgagggatcttgataagacacaacctttaaaccctattggtt

SEQ ID NO: 1071 - DNA, 507 bp, Artificial
  Mutation introduced by TALE nuclease pair POT32_T03 within a POT32 allele
gcaagcttgtgcaatagtagtagtacatccctcaaaactccttttacttcttcctccacttctttaacttccactcctaaaccctctcaacttttcatccatggaaaacgtaaccaaatgttcaaagtttcatgcatggttaccaataataacggtgaccaaaaccaaaacgttgaaacgaattctgttgatcgaagaaatgttcttcttggcttaggtggtctttatggtgttgctaatgctataccattagctgcatccgctactccatctccacctcctgatctctcgtcttgtagtatagccaggattaacgaaactcatgtggtgccgtacagttgttgcgcgcctaagcctgatgatatggagaaagttccgtattacaagttcccttctatgactaagctccgtgttcgtcagcctgctcaaatgaggagtatattgccaagtacaatttggcggttagcaagatgagggatcttgataagacacaacctttaaacccta

SEQ ID NO: 1072 - DNA, 465 bp, Artificial
  Mutation introduced by TALE nuclease pair POT32_T03 within a POT32 allele
  misc_feature (269); (427): n is a or c or t or g
gcaagcttgtgcaatagtagtagtacatctctcaaaactccttttacttcttcctccacttctttatcttccactcctaagcccctctcaacttttcatccatggaaaacgtaaccaaatgttcaaagtttcatgcaaggttatcaataataacggtgaccaaaacaagttgaaacgaattctgttgatcgaagaaatgttcttcttggcttaggtggtctttatggtgttgctaatgctataccattagctgcatccgctgctccaantccacctcctgatctctcgtcttgtagtatagccaggattaacgaaaatcaggtggtgccgtacagttgttgcgcgcctaagcctgatgatatggagaaagttccgtattacaagttcccttctatgactaagctccgtgttcgtcagcctgctcagngataatgaggagtatattgccaagtacaattgcgttgc

SEQ ID NO: 1073 - DNA, 501 bp, Artificial
  Mutation introduced by TALE nuclease pair POT32_T03 within a POT32 allele
gcaagcttgtgcaatagtagtagtacatctctcaaaactccttttacttcttcctccacttctttacttccactcctaagcccctctcaacttttcatccatggaaaacgtaaccaaatgttcaaagtttcatgcaaggttaccaataataacggtgaccaaaaccaaaacgttgaaacgaattctgttgatcgaagaaatgttcttcttggcttaggtggtctttatggtgttgctaatgctataccattagctgcatccgctgctccagctccacctcctgatctctcgtcttgtagtatagccaggattaacgaaaatcaggtggtgccgtacagttgttgcgcgcctaagcctgatgatatggagaaagttccgtattacaagttcccttctatgactaagctccgtgttcgtcagcctgctcagtagatagagggagtatattgccaagtacaatttggcggttagcaagatgagggatcttgataagacacaacc

SEQ ID NO: 1074 - DNA, 515 bp, Artificial
  Mutation introduced by TALE nuclease pair POT32_T03 within a POT32 allele
gcaagcttgtgcaatagtagtagtacatctctcaaaactccttttacttcttcctccacttctttatcttccactcctaagcccctctcaacttttcatccatggaaaacgtaaccaaatgttcaaagtttcatgcaaggttaccaataataacggtgaccaaaaccaaaacgttgaaacaaattctgttgatcgaagaaatgttcttcttggcttaggtggtctttatggtgttgctaatgctataccattagctgcatccgctgctccagctccacctcctgatctctcgtcttgtagtatagccaggattaacgaaaatcaggtggtgccgtacagttgttgcgcgcctaagcctgatgatatggagaaagttccgtattacaagttcccttctatgactaagctccgtgttcgtcagcctgctcctaatgaggagtatattgccaagtacaatctggcgattagtcgaatgaaagatcttgataagacacaacctttaaaccctattggtt

SEQ ID NO: 1075 - DNA, 521 bp, Artificial
  Mutation introduced by TALE nuclease pair POT32_T03 within a POT32 allele
  misc_feature (433): n is a or c or t or g
gcaagcttgtgcaatagtagtagtacatctctcaaaactccttttacttcttcctccacttctttaacttccactcctaagcccctctcaacttttcatccatggaaaacgtaaccaaatgttcaaagtttcatgcaaggttaccaataataacggtgaccaaaaccaaaacgttgaaacgaattctgttgatcgaagaaatgttcttcttggcttaggtggtctttatggtgttgctaatgctataccattagctgcatccgctgctccagctccacctcctgatctctcgtcttgtagtatagccaggattaacgaaaatcaggtggtgccgtacagcttgttgcgcgccttaagcctgatgatatggagaaagttccgtattacaagttcccttctatgactaagctccgtgttcgtcagcctgctcagngataatgaggagtatattgccaagtacaatctggcgattagtcgaatgaaagatcttgataagacacaacctttaaaccctattggtt

SEQ ID NO: 1076 - DNA, 462 bp, Artificial
  Mutation introduced by TALE nuclease pair POT32_T03 within a POT32 allele
gcaagcttgtgcaatagtgtagtacatctctcaaaactccttttacttcttcctccacttctttaacttccactcctaaccgcctctcaacttttcatccatggaaaacgtaaccaaatgttcaaagtttcatgcaaggttaccaataataacggtgaccaaaaccaaaacgttgaaacgaattctgttgatcgaagaaatgttcttcttggcttaggtggtctttatggtgttgctaatgctataccattagctgcatccgctgctccagctccacctcctgatctctcgtcttgtagtatagccaggattaacgaaaatcaggtggtgccgtacagttgttgcgcgcctaagcctgatgatatggagaaagttccgtattacaagttcccttctatgactaagctccgtgttcgtcagcctgctcatagatagaggagtatattgccaagtacaattgcg

SEQ ID NO: 1077 - DNA, 501 bp, Artificial
  Mutation introduced by TALE nuclease pair POT32_T03 within a POT32 allele
gcaagcttgtgcaatagtagtagtacatctctcaaaactccttttacttcttcctccacttctttatcttccactcctaagccctctcaacttttcatccatggaaaacgtaaccaaatgttcaaagtttcatgcaaggttaccaataataacggtgaccaaaaccaaaacgttgaaacaaaattctgttgatcgaagaaatgttcttcttggcttaggtggtctttatggtgttgctaatgctataccattagctgcatccgctgctccagctccacctcctgatctctcgtcttgtagtatagccaggattaacgaaaatcaggtggtgccgtacagttgttgcgcgcctaagcctgatgatatggagaaagttccgtattacaagttcccttctatgactaagctccgtgttcgtctcatgaaggaggtatattgccaagtacaatctggcgattagtcgaatgaaagatcttgataagacacaacctttaaacccta

SEQ ID NO: 1078 - DNA, 494 bp, Artificial
  Mutation introduced by TALE nuclease pair POT32_T03 within a POT32 allele
gcaagcttgtgcaatagttgtagtacatccctcaaaactccttttacttcttcctccacttctttaacttccactcctaaaccctctcaacttttcatccatggaaaacgtaaccaaatgttcaaagtttcatgcatggttaccaataataacggtgaccaaaaccaaaacgttgaaacgaattctgttgatcgaagaaatgttcttcttggcttaggtggtctttatggtgttgctaatgctataccattagctgcatccgctactccatctccacctcctgatctctcgtcttgtagtatagccaggattaacgaaactcatgtggtgccgtacagttgttgcgcgcctaagcctgatgatatggagaaagttccgtattacaagttcccttctatgactaagctccgtgttcgtcagcctgctaatgaggagtatattgccaagtacaatttggcggttagcaagatgagggatcttgataagacacaacc

SEQ ID NO: 1079 - DNA, 508 bp, Artificial
  Mutation introduced by TALE nuclease pair POT32_T03 within a POT32 allele
gcaagcttgtgcaatagtagtagtacatctctcaaaactccttttacttcttcctccacttctttatcttccactcctaagcccctctcaacttttcatccatggaaaacgtaaccaaatgttcaaagtttcatgcaaggttaccaataataacggtgaccaaaaccaaaacgttgaaacgaattctgttgatcgaagaaatgttcttcttggcttaggtggtctttatggtgttgctaatgctataccattagctgcatccgctgctccagctccacctcctgatctctcgtcttgtagtatagccaggattaacgaaaatcaggtggtgccgtacagttgttgcgcgcctaagcctgatgatatggagaaagttccgtattacaagttcccttctatgactaagctccgtgttcgtcagcctgctcataatgaggagtatattgccaagtacaatttggcggttagcaagatgaggggatcttgataagacacaacctttaaaccc

SEQ ID NO: 1080 - DNA, 501 bp, Artificial
  Mutation introduced by TALE nuclease pair POT32_T03 within a POT32 allele
gcaagcttgtgcaatagtagtagtaccactctcaaaactccttttacttcttcctccacttctttatcttccactcctaagcccctctcaacttttcctccatggaaaacgtaacaaaacgttcaaagtttcatgcaaggttaccaataataacggtgaccaaaacgttgaaacgaattctgttgatcgaagaaatgttcttcttggcttaggtggtctttatggtgttgctaatgctataccattagctgcatccgctactccagctccacctcctgatctctcatcttgtagtaaagcaaagattaatgaactacggaggtgccatacagttgttgcgctcccacgcctaaagatatgaagaaagttccatattacaagttcccttctatgactaagctccgtattcgtcccctgctcataatgaggagtatattgccaagtacaatctggcgattagtcgaatgaaagatcttgataagacacaacctttaaacccta

SEQ ID NO: 1081 - DNA, 516 bp, Artificial
  Mutation introduced by TALE nuclease pair POT32_T03 within a POT32 allele
gcaagcttgtgcaatagtagtagtacatctctcaaaactccttttacttcttcctccacttctttatcttccactcctaagcccctctcaacttttcatccagtaagaagacatatccaaatgtttcaatgttcagttcaagtccaataataacggtgaccaaaaccaaaacgttgaaacgaattctgttgatcgaagaaatgttcttcttggcttaggtggtctttatggtgttgctaatgctataccattagctgcatccgctactccatctccacctcctgatctctcgtcttgtagtatagccaggattaacgaaactcatgtggtgccgtacagttgttgcgcgcctaagcctgatgatatggagaaagttccgtattacaagttcccttctatgactaagctccgtgttcgtcagcctgctcataatgaggagtatattgccaagtacaatttggcggttagcaagatgaggggatcttgataagacacaacctttaaaccctattggtt

SEQ ID NO: 1082 - DNA, 491 bp, Artificial
  Mutation introduced by TALE nuclease pair POT32_T03 within a POT32 allele
gcaagcttgtgcaatagttgtagtacatccctcaacatccttttacttcttcctccacttctttaacttccactcctaaaccctctcaacttttcatccatggaaaacgtaaccaaatgttcaaagtttcatgcatggttaccaataataacggtgaccaaaaccaaaacgttgaaacgaattctgttgatcgaagaaatgttcttcttggcttaggtggtctttatggtgttgctaatgctataccattagctgcatccgctactccatctccacctcctgatctctcgtcttgtagtatagccaggattaacgaaactcatgtggtgccgtacagttgttgcgcgcctaagcctgatgatatggagaaagttccgtattacaagttcccttctatgactaagctccgtgttcgtcagcctgctaatgaggagtatattgccaagtacaatttggcggttagcaagatgagggatcttgataagacacaa

SEQ ID NO: 1083 - DNA, 488 bp, Artificial
  Mutation introduced by TALE nuclease pair POT32_T03 within a POT32 allele
gcaagcttgtgcaatagtagtagtacatctctcaaaactccttttacttcttcctccacttctttatcttccactcctaagcccctctcaacttttcatccatggaaaacgtaaccaaatgttcaaagtttcatgcaggttatcaataataacggtgaccaaaacgttgaaacgaattctgttgatcgaagaaatgttcttcttggcttaggtggtctttatggtgttgctaatgctataccattagctgcatccgctgctccaactccacctcctgatctctcgtcttgtagtatagccaggattaacgaaaatcaggtggtgccgtacagttgttgcgcgcctaagcctgatgatatggagaaagttccgtattacaagttcccttctatgactaagctccgtgttcgtcagcctgctcaaatgaggagtatattgccaagtacaatctggcgattagtcgaatgagagatcttgataagacacaa

SEQ ID NO: 1084 - DNA, 499 bp, Artificial
  Mutation introduced by TALE nuclease pair POT32_T03 within a POT32 allele
gcaagcttgtgcaatagtagtagtacatctctcaaaactccttttacttcttcctccacttctttatcttccactcctaagcccctctcaacttttcatccatggaaaacgtaaccaaatgttcaaagtttcatgcaaggttaccaataataacggtgaccaaaaccaaaacgttgaaacaaattctgttgatcgaagaaatgttcttcttggcttaggtggtctttatggtgttgctaatgctataccattagctgcatccgctgctccagctccacctcctgatctctcgtcttgtagtatagccaggattaacgaaaatcaggtggtgccgtacagttgttgcgcgcctaagcctgatgatatggagaaagttccgtattacaagttcccttctatgactaagctccgtgttgtctataatggaggtatattgccaagtacaatctggcgattagtcgaatgaaagatcttgataagacacaacctttaaacccta

SEQ ID NO: 1085 - DNA, 461 bp, Artificial
  Mutation introduced by TALE nuclease pair POT32_T03 within a POT32 allele
gcaagcttgtgcaatagtagtagtacatctctcaaaactccttttacttcttcctccacttctttatcttccactcctaagccctctcaacttttcatccatggaaaacgtaaccaaatgttcaaagtttcatgcaaggttaccaataataacggtgaccaaaaccaaaacgttgaaacaaattctgttgatcgaagaaatgttcttcttggcttaggtggtctttatggtgttgctaatgctataccattagctgcatccgctgctccagctccacctcctgatctctcgtcttgtagtatagccaggattaacgaaaatcaggtggtgccgtacagttgttgcgcgcctaagcctgatgatatggagaaagttccgtattacaagttcccttctatgactaagctccgtgttcgtcagcctgctctagatagaggagtatattgccaagtacaattgcg

SEQ ID NO: 1086 - DNA, 495 bp, Artificial
  Mutation introduced by TALE nuclease pair POT32_T03 within a POT32 allele
gcaagcttgtgcaatagtagtagtacatctctcaaaactccttttacttcttcctccacttctttatcttccactcctaagcccctctcaacttttcatccatggaaaacgtaaccaaatgttcaaagtttcatgcaaggttaccaataataacggtgaccaaaaccaaaacgttgaaacgaattctgttgatcgaagaaatgttcttcttggcttaggtggtctttatggtgttgctaatgctataccattagctgcatccgctgctccagctccacctcctgatctctcgtcttgtagtatagccaggattaacgaaaatcaggtggtgccgtacagttgttgcgcgcctaagcctgatgatatggagaaagttccgtattacaagttcccttctatgactaagctccgtgttcgtcagcctgctcaaatgaggagtatattgccaagtacaatttggcggttagcaagatgagggatcttgataagacacaa

SEQ ID NO: 1087 - DNA, 537 bp, Artificial
  Mutation introduced by TALE nuclease pair POT32_T03 within a POT32 allele
gcaagcttgtgcaatagttgtagtacatccctcaaaactccttttacttcttcctccacttctttaacttccactcctaaaccctctcaacttttcatccatggaaaacgtaaccaaatgttcaaagtttcatgcatggttaccaataataacggtgaccaaaaccaaaacgttgaaacgaattctgttgatcgaagaaatgttcttcttggcttaggtggtctttatggtgttgctaatgctataccattagctgcatccgctactccatctccacctcctgatctctcgtcttgtagtatagccaggattaacgaaactcatgtggtgccgtacagttgttgcgcgcctaagcctgatgatatggagaaagttccgtattacaagttcccttctatgactaagctccgtgttcgttcactctcaatccaaataatctgcaccggatctcgcccttacctgctagtcaagtacaattttgggcggttagcaagatgagggatcttgataagacacaacctttaaaccctattggtt

SEQ ID NO: 1088 - DNA, 467 bp, Artificial
  Mutation introduced by TALE nuclease pair POT32_T03 within a POT32 allele
  misc_feature (429): n is a or c or t or g
gcaagcttgtgcaatagtagtagtacatctctcaaaactccttttacttcttcctccacttctttaacttccactcctaagcccctctcaacttttcatccatggaaaacgtaaccaaatgttcaaagtttcatgcaaggttaccaataataacggtgaccaaaaccaaaacgttgaaacgaattctgttgatcgaagaaatgttcttcttggcttaggtggtctttatggtgttgctaatgctataccattagctgcatccgctgctccagtccacctcctgatctctcgtcttgtagtatagccaggattaacgaaaactcagtggtgccgtacagttgttgcgcgcctaagcctgatgatatggagaaagttccgtattacaagttcccttctatgactaagctccgtgttcgtcagcctgctcangataatgaggagtatattgccaagtacaattgcgttgc

SEQ ID NO: 1089 - DNA, 458 bp, Artificial
  Mutation introduced by TALE nuclease pair POT32_T03 within a POT32 allele
gcaagcttgtgcaatagtagtagtacatctctcaaaactccttttacttcttcctccacttctttaacttccactcctaaacccctctcaacttttcatccatggaaaacgtaaccaaatgttcaaagtttcatgcaaggttaccaataataacggtgaccaaaaccaaaacgttgaaacgaattctgttgatcgaagaaatgttcttcttggcttggtggtcttatggtgttgctaatgctataccattagctgcatccgctactccatctccacctcctgatctctcgtcttgtagtatagccaggattaacgaaactcatgtggtgccgtacagttgttgcgcgcctaagcctgatgatatggagaaagttccgtattacaagttcccttctatgactaagctccgtgttcgtcagcctgctcactaatgaggagtatattgccaagtacaattt

SEQ ID NO: 1090 - DNA, 441 bp, Artificial
  Mutation introduced by TALE nuclease pair POT32_T03 within a POT32 allele
gcaagcttgtgcaatagtagtagtaccactctcaaaactccttttacttcttcctccacttctttatcttccactcctaagcccctctcaacttttcctccatggaaaacgtaacaaaacgttcaaagtttcatgcaaggttaccaataataacggtgaccaaaacgttgaaacgaattctgttgatcgaagaaatgttcttcttggcttaggtggtctttatggtgttgctaatgctataccattagctgcatccgctactccagctccacctcctgatctctcatcttgtagtaaagcaaagattaatgaaactacggaggtgccatacagttgttgcgctccccacgccaaaagatatgaagaaagttccatattacaagttcccttctatgactaagctccgtcattcgtcccctgcttaatgaggagtatattgcc

SEQ ID NO: 1091 - DNA, 500 bp, Artificial
  Mutation introduced by TALE nuclease pair POT32_T03 within a POT32 allele
  misc_feature (159): n is a or c or t or g
gcaagcttgtgcaatagttgtagtacatccctcaaaactccttttacttcttcctccacttctttaacttccactcctaaacccctctcaacttttcatccatggaaaacgtaaccaaatgttcaaagtttcatgcatggttaccaataataacggtgnccaaaaccaaaacgttgaaacgaattctgttgatcgaagaaatgttcttcttggcttaggtggtctttatggtgttgctaatgctataccattagctgcatccgctactccatctccacctcctgatctctcgtcttgtagtatagccaggattaacgaaactcatgtggtgccgtacagttgttgcgcgcctaagcctgatgatatggagaaagttccgtattacaagttcccttctatgactaagctccgtgttcgtcagcgaagctaatgaggagtatattgtcaagtacaatttggcggttagcaagatgaggggatcttgataagacacaaccttt

SEQ ID NO: 1092 - DNA, 494 bp, Artificial
  Mutation introduced by TALE nuclease pair POT32_T03 within a POT32 allele
gcaacttgtgcaatagtagtagtacatctctcaaaactccttttacttcttcctccacttctttatcttccactcctaagccctctcaacttttcatccatggaaaacgtaaccaaatgttcaaagtttcatgcaaggttaccaataataacggtgaccaaaaccaaaacgttgaaacaaattctgttgatcgaagaaatgttcttcttggcttaggtggtctttatggtgttgctaatgctataccattagctgcatccgctgctccagctccacctcctgatctctcgtcttgtagtatagccaggattaacgaaaatcaggtggtgccgtacagttgttgcgcgcctaagcctgatgatatggagaaagttccgtattacaagttcccttctatgactaagctccgtgttcgtcagcctgctcatgaagtatattgccaagtacaatctggcgattagtcgaatgaaagatcttgataagacacaaccttt

SEQ ID NO: 1093 - DNA, 514 bp, Artificial
  Mutation introduced by TALE nuclease pair POT32_T03 within a POT32 allele
gcaagcttgtgcaatagtagtagtacatctctcaaaactccttttacttcttcctccacttctttatcttccactcctaagcccctctcaactttttcatccatgggaaaagcagctaagtccaaaatgccaatttcgaaattcgtttcaaagtttgccaaaggtttgacccaaatggttaatccaaactaggttgaacccggaaaatgaccccaaaaaacccaaacggttttggaaaacgaaattctgttgatcgaagaaaatgttcttcttgggcttaggtggtctttatggtgttgctaatgctataccattagctgcatccgctgctccagctccacctcctgatctctcgtcttgtagtatagccaggattaacgaaaatcaggtggtgccgtacagttgttgcgcgcctaagcctgatgatatggagaaagtttcccgtattacaagttccccttctatgactaagctcccgtgttcgtcagcctgctcatatgagggagtatatttg

SEQ ID NO: 1094 - DNA, 513 bp, Artificial
  Mutation introduced by TALE nuclease pair POT32_T03 within a POT32 allele
gcaagcttgtgcaatagtgtagtacatcctcaacaatccttttacttcttcctccacttctttacttccactcctaaccgcctctcaacttttcatccatggaaaacgtaaccaaatgttcaaagtttcatgcaaggttaccaataataacggtgaccaaaaccaaaacgttgaaacgaattctgttgatcgaagaaatgttcttcttggcttaggtggtctttatggtgttgctaatgctataccattagctgcatccgctgctccagctccacctcctgatctctcgtcttgtagtatagccaggattaacgaaaatcaggtggtgccgtacagttgttgcgcgcctaagcctgatgatatggagaaagttccgtattacaagttcccttctatgactaagctccgtgttcgtcagcctgctcatgatagaggagtatattgccaagtacaatttggcggttagcaagatgagggatcttgataagacacaacctttaaatcctattggtt

SEQ ID NO: 1095 - DNA, 476 bp, Artificial
  Mutation introduced by TALE nuclease pair POT32_T03 within a POT32 allele
gcaagcttgtgcaatagtagtagtacatctctcaaaactccttttacttcttcctccacttctttaacttccactcctaagcccctctcaacttttcatccatggaaaacgtaaccaaatgttcaaagtttcatgcaaggttaccaataataacggtgaccaaaaccaaaacgttgaaacgaattctgttgatcgaagaaatgttcttcttggcttaggtggtctttatggtgttgctaatgctataccattagctgcatccgctgctccagctccacctcctgatctctcgtcttgtagtatagccaggattaacgaaaatcaggtggtgccgtacagttgttgcgcgcctaagcctgatgatatggagaaagttccgtattacaagttcccttctatgactaagctccgtgttcgtcagcctgctcataatgaggagtatattgccaagtacaatttggcggttagcaagatga

SEQ ID NO: 1096 - DNA, 496 bp, Artificial
  Mutation introduced by TALE nuclease pair POT32_T03 within a POT32 allele
gcaagcttgtgcaatagttgtagtacatccctcaaaactccttttacttcttcctccacttctttaacttccactcctaaaccctctcaacttttcatccatggaaaacgtaaccaaatgttcaaagtttcatgcaaggttaccaataataacggtgaccaaaaccaaaacgttgaaacgaattctgttgatcgaagaaatgttcttcttggcttaggtggtctttatggtgttgctaatgctataccattagctgcatccgctactccatctccacctcctgatctctcgtcttgtagtatagccaggattaacgaaactcatgtggtgccgtacagttgttgcgcgcctaagcctgatgatatggagaaagttccgtattacaagttcccttctatgactaagctccgtgttcgtcagcctgctcaaatgaggagtatattgccaagtacaatttggcggttagcaagatgagggatcttgataagacacaacc

SEQ ID NO: 1097 - DNA, 510 bp, Artificial
  Mutation introduced by TALE nuclease pair POT32_T03 within a POT32 allele
gcaagcttgtgcaatagtagtagtacatctctcaaaactccttttacttcttcctccacttctttatcttccactcctaagcccctctcaacttttcatccatggaaaacgtaaccaaatgttcaaagtttcatgcaaggttatcaataataacggtgaccaaaacgttgaaacgaattctgttgatcgaagaaatgttcttcttggcttaggtggtctttatggtgttgctaatgctataccattagctgcatcctctgctccaactccacctcctgatctctcgtcttgtagtatagccaggattaacgaaaatcaggtgttgccgtacagttgttgcgcgcctaagcctgatgatatggagaaagttccgtattacaagttcccttctatgactaagctccgtgttcgtcagcctgctcactaatgaggagtatattgccaagtacaatctggcgattagtcgaatgagagatcttgataagacacaacctttaaaccctattggtt

SEQ ID NO: 1098 - DNA, 472 bp, Artificial
  Mutation introduced by TALE nuclease pair POT32_T03 within a POT32 allele
gcaagcttgtgcaatagttgtagtacatccctcaaaactccttttacttcttcctccacttctttaacttccactcctaaaccctctcaacttttcatccatggaaaacgtaaccaaatgttcaaagtttcatgcatggttaccaataataacggtgaccaaaaccaaaacgttgaaacgaattctgttgatcgaagaaatgttcttcttggcttaggtggtctttatggtgttgctaatgctataccattagctgcatccgctactccatctccacctcctgatctctcgtcttgtagtatagccaggattaacgaaactcatgtggtgccgtacagttgttgcgcgcctaagcctgatgatatggagaaagttccgtattacaagttcccttctatgactaagctccgtgttcgtcagcctgctaatgaggagtatattgccaagtacaatttggcggttagcaagatga

SEQ ID NO: 1099 - DNA, 501 bp, Artificial
  Mutation introduced by TALE nuclease pair POT32_T03 within a POT32 allele
gcaagcttgtgcaatagtagtagtacatctctcaaaactccttttacttcttcctccacttctttatcttccactcctaagccctctcaacttttcatccatggaaaacgtaaccaaatgttcaaagtttcatgcaaggttaccaataataacggtgaccaaaaccaaaacgttgaaacaaattctgttgatcgaagaaatgttcttcttggcttaggtggtctttatggtgttgctaatgctataccattagctgcatccgctgctccagctccacctcctgatctctcgtcttgtagtatagccaggattaacgaaaatcaggtggtgccgtacagttgttgcgcgcctaagcctgatgatatggagaaagttccgtattacaagttcccttctatgactaagctccgtgttgtcgtcatgaatggaggtatattgccaagtacaatctggcgattagtcgaatgaaagatcttgataagacacaacctttaaacccta

SEQ ID NO: 1100 - DNA, 472 bp, Artificial
  Mutation introduced by TALE nuclease pair POT32_T03 within a POT32 allele
gcaagcttgtgcaatagttgtagtacatctctcaaaactccttttacttcttcctccacttctttaacttccactcctaaaccctctcaacttttcatccatggaaaacgtaaccaaatgttcaaagtttcatgcaaggttaccaataataacggtgaccaaaaccaaaacgttgaaacgaattctgttgatcgaagaaatgttcttcttggcttaggtggtctttatggtgttgctaatgctataccattagctgcatccgctactccatctccacctcctgatctctcgtcttgtagtatagccaggattaacgaaactcatgtggtgccgtacagttgttgcgcgcctaagcctgatgatatggagaaagttccgtattacaagttcccttctatgactaagctccgtgttcgtcagcctgctcatgaggagtatattgccaagtacaatttggcggttagcaagatga

SEQ ID NO: 1101 - DNA, 510 bp, Artificial
  Mutation introduced by TALE nuclease pair POT32_T03 within a POT32 allele
  misc_feature (429): n is a or c or t or g
gcaagcttgtgcaatagtagtagtacatctctcaaaactccttttacttcttcctccacttctttatcttccactcctaagccctctcaacttttcatccatggaaaacgtaaccaaatgttcaaagtttcatgcaaggttaccaataataacggtgaccaaaaccaaaacgttgaaacaaattctgttgatcgaagaaatgttcttcttggcttaggtggtctttatggtgttgctaatgctataccattagctgcatccgctgctccagctccacctcctgatctctcgtcttgtagtatagccaggattaacgaaaatcaggtggtgccgtacagttgttgcgcgcctaagcctgatgatatggagaaagttccgtattacaagttcccttctatgactaagctccgtgttcgtcagcctgctcanataatgaggagtatattgccaagtacaatctggcgattagtcgaatgaaagatcttgataagacacaacctttaaacccta

SEQ ID NO: 1102 - DNA, 517 bp, Artificial
  Mutation introduced by TALE nuclease pair POT32_T03 within a POT32 allele
gcaagcttgtgcaatagtagtagtacatctctcaaaactcctttttacttcttcctccacttctttaactttccactcctaagccctctcaacttttcatccatggaaaacgtaaccaaatgttcaaagtttcatgcaaggttaccaataataacggtgaccaaaaccaaaacgttgaaacgaattctgttgatcgaagaaatgttcttcttggcttaggtggtctttatggtgttgctaatgctataccattagctgcatccgctgctccagctccacctcctgatctctcgtcttgtagtatagccaggattaacgaaaatcaggtggtgccgtacagttgttgcgcgcctaagcctgatgatatggagaaagttccgtattacaagttcccttctatgactaagctccgtgttcgtcagcctgctcgctaatgaggagtatattgccaagtacaatctggcgattagtcgaatgaaagatcttgataagacacaacctttaaaccctattggtt

SEQ ID NO: 1103 - DNA, 508 bp, Artificial
  Mutation introduced by TALE nuclease pair POT32_T03 within a POT32 allele
gcaagcttgtgcaatagtagtagtacatctctcaaaactccttttacttcttcctccacttctttatcttccactcctaagcccctctcaacttttcatccatggaaaacgtaaccaaatgttcaaagtttcatgcaaggttaccaataataacggtgaccaaaaccaaaacgttgaaacaaattctgttgatcgaagaaatgttcttcttggcttaggtggtctttatggtgttgctaatgctataccattagctgcatccgctgctccagctccacctcctgatctctcgtcttgtagtatagccaggattaacgaaaatcaggtggtgccgtacagttgttgcgcgcctaagcctgatgatatggagaaagttccgtattacaagttcccttctatgactaagctccgtgttcgtcagccaagctaatgaggagtatattgccaagtacaatttggcggttagcaagatgaggggatcttgataagacacaacctttaaacccta

SEQ ID NO: 1104 - DNA, 505 bp, Artificial
  Mutation introduced by TALE nuclease pair POT32_T03 within a POT32 allele
gcaagcttgtgcaatagtagtagtacatctctcaaaactccttttacttcttcctccacttctttaacttccactcctaagccctctcaacttttcatccatggaaaacgtaaccaaatgttcaaagtttcatgcaaggttaccaataataacggtgaccaaaaccaaaacgttgaaacgaattctgttgatcgaagaaatgttcttcttggcttaggtggtctttatggtgttgctaatgctataccattagctgcatccgctgctccagctccacctcctgatctctcgtcttgtagtatagccaggattaacgaaaatcaggtggtgccgtacagttgttgcgcgcctaagcctgatgatatggagaaagttccgtattacaagttcccttctatgactaagctccgtgttcgtcagcctgctcatgaagagtatattgccaagtacaatttggcggttagcaagatgagggatcttgataagacacaacctttaaacccta

SEQ ID NO: 1105 - DNA, 477 bp, Artificial
  Mutation introduced by TALE nuclease pair POT32_T03 within a POT32 allele
gcaagcttgtgcaatagtagtagtacatctctcaaaactccttttacttcttcctccacttctttatcttccactcctaagccctctcaacttttcatccatggaaaacgtaaccaaatgttcaaagtttcatgcaaggttaccaataataacggtgaccaaaaccaaaacgttgaaacgaattctgttgatcgaagaaatgttcttcttggcttaggtggtctttatggtgttgctaatgctataccattagctgcatccgctgctccagctccacctcctgatctctcgtcttgtagtatagccaggattaacgaaaatcaggtggtgccgtacagttgttgcgcgcctaagcctgatgatatggagaaagttccgtattacaagttcccttctatgactaagctccgtgttcgtcagcctgctcatctaatgaggagtatattgccaagtacaatttggcggttagcaagatga

SEQ ID NO: 1106 - DNA, 454 bp, Artificial
  Mutation introduced by TALE nuclease pair POT32_T03 within a POT32 allele
gcaagcttgtgcaatagtagtagtacatctctcaaaactccttttacttcttcctccacttctttacttccactcctaagccctctcaacttttcatccatggaaaacgtaaccaaatgttcaaagtttcatgcaaggttaccaataataacggtgaccaaaaccaaaacgttgaaacaaattctgttgatcgaagaaatgttcttcttggcttaggtggtctttatggtgttgctaatgctataccattagctgcatccgctgctccagctccacctcctgatctctcgtcttgtagtatagccaggatttaacgaaaatcaggtggtgccgtacagttgttgcgcgcctaagcctgatgatatggagaaagttccgtattacaagttcccttctatgactaagctccgtgttcgtcagcctgctcaaatgaggagtatattgccaagtacaa

SEQ ID NO: 1107 - DNA, 496 bp, Artificial
  Mutation introduced by TALE nuclease pair POT32_T03 within a POT32 allele
gcaagcttgtgcaatagtagtagtacatctctcaaaactccttttacttcttcctccacttctttatcttccactcctaagcccctctcaacttttcatccatggaaaacgtaaccaaatgttcaaagtttcatgcaaggttatcaataataacggtgaccaaaacgttgaaacgaattctgttgatcgaagaaatgttcttcttggcttaggtggtctttatggtgttgctaatgctataccattagctgcatccgctgctccaactccacctcctgatctctcgtcttgtagtatagccaggattaacgaaaatcaggtggtgccgtacagttgttgcgcgcctaagcctgatgatatggagaaagttccgtattacaagttcccttctatgactaagctccgtgttcgtcagcctgctcactaatgaggagtatattgccaagtacaatctggcgattagtcgaatgagagatcttgataagacacaaccttt

SEQ ID NO: 1108 - DNA, 493 bp, Artificial
  Mutation introduced by TALE nuclease pair POT32_T03 within a POT32 allele
gcaagcttgtgcaatagtagtagtacatctctcaaaactccttttacttcttcctccacttctttaacttccactcctaagcccctctcaacttttcatccatggaaaacgtaaccaaatgttcaaagtttcatgcaaggttaccaataataacggtgaccaaaaccaaaacgttgaaacgaattctgttgatcgaagaaatgttcttcttggcttaggtggtctttatggtgttgctaatgctataccattagctgcatccgctgctccagctccacctcctgatctctcgtcttgtagtatagccaggattaacgaaaatcaggtggtgccgtacagttgttgcgcgcctaagcctgatgatatggagaaagttccgtattacaagttcccttctatgactaagctccgtgttcgtcagcctgctcatgaggagtatattgccaagtacaatctggcgattagtcgaatgaaagatcttgataagacacaa

SEQ ID NO: 1109 - DNA, 491 bp, Artificial
  Mutation introduced by TALE nuclease pair POT32_T03 within a POT32 allele
  misc_feature (154): n is a or c or t or g
gcaagcttgtgcaatagtagtagtacatctctcaaaactccttttacttcttcctccacttctttacttccactcctaagcccctctcaacttttcatccatggaaaacgtaaccaaatgttcaaagtttcatgcaaggttacataataatagngcgaaaccaaaacgttgaaacgaattctgttgatcgaagaaatgttcttcttggcttaggtggtctttatggtgttgctaatgctataccattagctgcatccgctgctccagtccacctcctgatctctcgtcttgtagtatagccaggattaacgaaaatcaggtggtgccgtacagttgttgcgcgcctaagcctgatgatatggagaaagttccgtattacaagttcccttctatgactaagctccgtgttcgtcagcctgctcatagatatgaggagtatattgccaagtacaatctggcgattagtcgaatgaagagtcttgataagacac

SEQ ID NO: 1110 - DNA, 486 bp, Artificial
  Mutation introduced by TALE nuclease pair POT32_T03 within a POT32 allele
gcaagcttgtgcaatagttgtagtacatccctcaaaactccttttacttcttcctccacttctttaacttccactcctaaaccctctcaacttttcatccatggaaaacgtaaccaaatgttcaaagtttcatgcatggttaccaataataacggtgaccaaaaccaaaacgttgaaacgaattctgttgatcgaagaaatgttcttcttggcttaggtggtctttatggtgttgctaatgctataccattagctgcatccgctactccatctccacctcctgatctctcgtcttgtagtatagccaggattaacgaaactcatgtggtgccgtacagttgttgcgcgcctaagcctgatgatatggagaaagttccgtattacaagttcccttctatgactaagctccgtgttcgtcagcctgaggagtatattgccaagtacaatttggcggttagcaagatgagggatcttgataagacacaa

SEQ ID NO: 1111 - DNA, 442 bp, Artificial
  Mutation introduced by TALE nuclease pair POT32_T03 within a POT32 allele
gcaagcttgtgcaatagtagtagtacatctctcaaaactccttttacttcttcctccacttctttatcttccactcctaagccctctcaacttttcatccatggaaaacgtaaccaaatgttcaaagtttcatgcaaggttaccaataataacggtgaccaaaaccaaaacgttgaaacgaattctgttgatcgaagaaatgttcttcttggcttaggtggtctttatggtgttgctaatgctataccattagctgcatccgctgctccagctccacctcctgatctctcgtcttgtagtatagccaggattaacgaaaatcaggtggtgccgtacagttgttgcgcgcctaagcctgatgatatggagaaagttccgtattacaagttcccttctatgactaagctccgtgttcgtcagccgagtatattgccaagtacaa

SEQ ID NO: 1112 - DNA, 460 bp, Artificial
  Mutation introduced by TALE nuclease pair POT32_T03 within a POT32 allele
gcaagcttgtgcaatagtagtagtacatctctcaaaactccttttacttcttcctccacttctttatcttccactcctaagcccctctcaacttttcatccatggaaaacgtaaccaaatgttcaaagtttcatgcaaggttaccaataataacggtgaccaaaaccaaaacgttgaaacgaattctgttgatcgaagaaatgttcttcttggcttaggtggtctttatggtgttgctaatgctataccattagctgcatccgctgctccagctccacctcctgatctctcgtcttgtagtatagccaggattaacgaaaatcaggtggtgccgtacagttgttgcgcgcctaagcctgatgatatggagaaagttccgtattacaagttcccttctatgactaagctccgtgttcgtcagccgagtatattgccaagtacaatttggcggttagcaaga

SEQ ID NO: 1113 - DNA, 517 bp, Artificial
  Mutation introduced by TALE nuclease pair POT32_T03 within a POT32 allele
gcaagcttgtgcaatagtagtagtacatctctcaaaactccttttacttcttcctccacttctttatcttccactcctaagccctctcaacttttcatccatggaaaacgtaaccaaatgttcaaagtttcatgcaaggttaccaataataacggtgaccaaaaccaaaacgttgaaacgaattctgttgatcgaagaaatgttcttcttggcttaggtggtctttatggtgttgctaatgctataccattagctgcatccgctgctccagctccacctcctgatctctcgtcttgtagtatagccaggattaacgaaaatcaggtggtgccgtacagttgttgcgcgcctaagcctgatgatatggagaaagttccgtattacaagttcccttctatgactaagctccgtgttcgtcagcctgctcatctaatgaggagtatattgccaagtacaatttggcggttagcaagatgagggatcttgataagacacaaccttttaaaccctattggtt

SEQ ID NO: 1114 - DNA, 499 bp, Artificial
  Mutation introduced by TALE nuclease pair POT32_T03 within a POT32 allele
gcaagcttgtgcaatagtagtagtaccactctcaaaactccttttacttcttcctccacttctttatcttccactcctaagccctctcaacttttcctccatggaaaacgtaacaaaacgttcaaagtttcatgcaaggttaccaataataacggtgaccaaaacgttgaaacgaattctgttgatcgaagaaatgttcttcttggcttaggtggtctttatggtgttgctaatgctataccattagctgcatccgctactccagctccacctcctgatctctcatcttgtagtaaagcaaagattaatgaaactacggaggtgccatacagttgttgcgctcccacgccaaagatatgaagaaagttccatattacaagttcccttctatgactaagctccgtattcgtccccctgctctgaggagtatattgccaagtacaatttggcggttagcaagatgaggggaatcttgataagacacaacctttaaacccta

SEQ ID NO: 1115 - DNA, 518 bp, Artificial
  Mutation introduced by TALE nuclease pair POT32_T03 within a POT32 allele
gcaagcttgtgcaatagttgtagtacatctctcaaaactccttttacttcttcctccacttctttaacttccactcctaaaccctctcaacttttcatccatggaaaacgtaaccaaatgttcaaagtttcatgcaaggttaccaataataacggtgaccaaaaccaaaacgttgaaacgaattctgttgatcgaagaaatgttcttcttggcttaggtggtctttatggtgttgctaatgctataccattagctgcatccgctactccatctccacctcctgatctctcgtcttgtagtatagccaggattaacgaaaactcatgtggtgccgtacagttgttgcgcgcctaagcctgatgatatggagaaagttccgtattacaagttcccttctatgactaagctccgtgttcgtcagcctgctcactaatgaggagtatattgccaagtacaatttggcggttagcaagatgaggggatcttgataagacacaaccttttaaaccctattggtt

SEQ ID NO: 1116 - DNA, 489 bp, Artificial
  Mutation introduced by TALE nuclease pair POT32_T03 within a POT32 allele
gcaagcttgtgcaatagtagtagtacatctctcaaaactccttttacttcttcctccacttctttaacttccactcctaaaccctctcaacttttcatccatggaaaacgtaaccaaatgttcaaagtttcatgcatggttaccaataataacggtgaccaaaaccaaaacgttgaaacgaattctgttgatcgaagaaatgttcttcttggcttaggtggtctttatggtgttgctaatgctataccattagctgcatccgctactccatctccacctcctgatctctcgtcttgtagtatagccaggattaacgaaactcatgtggtgccgtacagttgttgcgcgccaagcctgatgatatggagaaagttccgtattacaagttcccttctatgactaagctccgtgttcgtcagctaatgaggagtatattgccaagtacaatttggcggttagcaagatgagggatcttgataagacacaacc

SEQ ID NO: 1117 - DNA, 518 bp, Artificial
  Mutation introduced by TALE nuclease pair POT32_T03 within a POT32 allele
  misc_feature (271): n is a or c or t or g
gcaagcttgtgcaatagtagtagtacatctctcaaaactccttttacttcttcctccacttctttatcttccactcctaagcccctctcaacttttcatccatggaaaacgtaaccaaatgttcaaagtttcatgcaaggttactcaataatagcggctgaacccaaaacgttgaaacgaattctgttgatcgaagaaatgttcttcttggcttaggtggtctttatggtgttgctaatgctataccattagctgcatccgctgctccaantccacctcctgatctctcgtcttgtagtatagccaggattaacgaaaatcaggtggtgccgtacagttgttgcgcgcctaagcctgatgatatggagaaagttccgtattacaagttcccttctatgactaagctccgtgttcgtcagcctgctcagcataatgaggagtatattgccaagtacaatctggcgattagtcgaaatgaagagatcttgataagacacaacctttaaaccctattggtt

SEQ ID NO: 1118 - DNA, 503 bp, Artificial
  Mutation introduced by TALE nuclease pair POT32_T03 within a POT32 allele
gcaagcttgtgcaatagttgtagtacatccctcaaacatccttttacttcttcctccacttctttaacttccactcctaaaccctctcaacttttcatccatggaaaacgtaaccaaatgttcaaagtttcatgcaaggttaccaataataacggtgaccaaaaccaaaacgttgaaacgaattctgttgatcgaagaaatgttcttcttggcttaggtggtctttatggtgttgctaatgctataccattagctgcatccgctactccatctccacctcctgatctctcgtcttgtagtatagccaggattaacgaaactcatgtggtgccgtacagttgttgcgcgcctaagcctgatgatatggagaaagttccgtattacaagttcccttctatgactaagctccgtgttcgtcagcctgctcaaatgaggagtatattgccaagtacaatttggcgggttagcaagatgaggggatcttgataagacacaaccctttt

SEQ ID NO: 1119 - DNA, 497 bp, Artificial
  Mutation introduced by TALE nuclease pair POT32_T03 within a POT32 allele
gcaagcttgtgcaatagtagtagtacatctctcaaaactccttttacttcttcctccacttctttatcttccactcctaagccctctcaacttttcatccatggaaaacgtaaccaaatgttcaaagtttcatgcaaggttaccaataataacggtgaccaaaaccaaaacgttgaaacaaattctgttgatcgaagaaatgttcttcttggcttaggtggtctttatggtgttgctaatgctataccattagctgcatccgctgctccagctccacctcctgatctctcgtcttgtagtatagccaggattaacgaaaatcaggtggtgccgtacagttgttgcgcgcctaagcctgatgatatggagaaagttccgtattacaagttcccttctatgactaagctccgtgttcgtcagcctgctcctaatgaggagtatattgccaagtacaatctggcgattagtcgaatgaaagatcttgataagacacaacc

SEQ ID NO: 1120 - DNA, 516 bp, Artificial
  Mutation introduced by TALE nuclease pair POT32_T03 within a POT32 allele
gcaagcttgtgcaatagtagtagtacatctctcaaaactccttttacttcttcctccacttctttaacttccactcctaagcccctctcaacttttcatccatggaaaacgtaaccaaatgttcaaagtttcatgcaaggttaccaataataacggtgaccaaaaccaaaacgttgaaacaaattctgttgatcgaagaaatgttcttcttggcttaggtggtctttatggtgttgctaatgctataccattagctgcatccgctgctccagctccacctcctgatctctcgtcttgtagtatagccaggattaacgaaaatcaggtggtgccgtacagttgttgcgcgcctaagcctgatgatatggagaaagttccgtattacaagttcccttctatgactaagctccgtgttcgtcagcctgctcataatagaggagtatattgccaagtacaatctggcgattagtcgaatgaaagatcttgataagacacaacctttaaaccctattggtt

SEQ ID NO: 1121 - DNA, 473 bp, Artificial
  Mutation introduced by TALE nuclease pair POT32_T03 within a POT32 allele
gcaagcttgtgcaatagtagtagtacatctctcaaaactccttttacttcttcctccacttctttaacttccactcctaagcccctctcaacttttcatccatggaaaacgtaaccaaatgttcaaagtttcatgcaaggttaccaataataacggtgaccaaaaccaaaacgttgaaacgaattctgttgatcgaagaaatgttcttcttggcttaggtggtctttatggtgttgctaatgctataccattagctgcatccgctgctccagctccacctcctgatctctcgtcttgtagtatagccaggattaacgaaaatcaggtggtgccgtacagttgttgcgcgcctaagcctgatgatatggagaaagttccgtattacaagttcccttctatgactaagctccgtgttcgtcagcctgctcagctaatgaggagtatattgccaagtacaatctggcgattagtcg

SEQ ID NO: 1122 - DNA, 472 bp, Artificial
  Mutation introduced by TALE nuclease pair POT32_T03 within a POT32 allele
gcaagcttgtgcaatagtagtagtaccactctcaaaactccttttacttcttcctccacttctttatcttccactcctaagcccctctcaacttttcctccatggaaaacgtaacaaaacgttcaaagtttcatgcaaggttaccaataataacggtgaccaaaaccaaaacgttgaaacgaattctgttgatcgaagaaatgttcttcttggcttaggtggtctttatggtgttgctaatgctataccattagctgcatccgctactccatctccacctcctgatctctcatcttgtagtaaagcaaagattaatgaaactacggaggtgccatacagttgttgcgctcccacgcctaaagatatgaagaaagttccatattacaagttcccttctatgactaagctccgtattcgtccccatctaatgaggagtatattgccaagtacaatttggcggttagcaagatga

SEQ ID NO: 1123 - DNA, 508 bp, Artificial
  Mutation introduced by TALE nuclease pair POT32_T03 within a POT32 allele
gcaagcttgtgcaatagttgtagtacatccctcaaaacatccttttacttcttcctccacttctttaacttccactcctaaaccctctcaacttttcatccatggaaaacgtaaccaaatgttcaaagtttcatgcaaggttaccaataataacggtgaccaaaaccaaaacgttgaaacgaattctgttgatcgaagaaatgttcttcttggcttaggtggtctttatggtgttgctaatgctataccattagctgcatccgctactccatctccacctcctgatctctcgtcttgtagtatagccaggattaacgaaactcatgtggtgccgtacagttgttgcgcgcctaagcctgatgatatggagaaagttccgtattacaagttcccttctatgactaagctccgtgttcgtcagcctgctcaaatgaggagtatattgccaagtacaatttggcggttagcaagatgagggatcttgataagacacaacctttaaacccta

SEQ ID NO: 1124 - DNA, 467 bp, Artificial
  Mutation introduced by TALE nuclease pair POT32_T03 within a POT32 allele
gcaagcttgtgcaatagttgtagtacatccctcaaaactccttttacttcttcctccacttctttaacttccactcctaaacccctctcaacttttcatccatggaaaacgtaaccaaatgttcaaagtttcatgcatggttaccaataataacggtgaccaaaaccaaaacgttgaaacgaattctgttgatcgaagaaatgttcttcttggcttaggtggtctttatggtgttgctaatgctataccattagctgcatccgctactccatctccacctcctgatctctcgtcttgtagtatagccaggattaacgaaactcatgtggtgccgtacagttgttgcgcgcctaagcctgatgatatggagaaagttccgtattacaagttcccttctatgactaagctccgtgttcgtcagcctgaggagtatattgccaagtacaatttggcggttagcaagatga

SEQ ID NO: 1125 - DNA, 516 bp, Artificial
  Mutation introduced by TALE nuclease pair POT32_T03 within a POT32 allele
gcaagcttgtgcaatagttgtagtacatccctcaaaactccttttacttcttcctccacttctttaacttccactcctaaaccctctcaacttttcatccatggaaaacgtaaccaaatgttcaaagtttcatgcatggttaccaataataacggtgaccaaaaccaaaacgttgaaacgaattctgttgatcgaagaaatgttcttcttggcttaggtggtctttatggtgttgctaatgctataccattagctgcatccgctactccatctccacctcctgatctctcgtcttgtagtatagccaggattaacgaaactcatgtggtgccgtacagttgttgcgcgcctaagcctgatgatatggagaaagttccgtattacaagttcccttctatgactaagctccgtgttcgtcagcctgctctagatagaggagtatattgccaagtacaatttggcggttagcaagatgaggggatcttgataagacacaacctttaaaccctattggtt

SEQ ID NO: 1126 - DNA, 501 bp, Artificial
  Mutation introduced by TALE nuclease pair POT32_T03 within a POT32 allele
gcaagcttgtgcaatagtagtagtacatctctcaaaactccttttacttcttcctccacttctttatcttccactcctaagcccctctcaactttttcatccatgggaaaagcagctaagtccaaaatgcaatttcgaaattcgtttcaaagtttgccaaggttgaccaaatggtaatccaaactaggttgaacccggaaaatgaccccaaaaaaccaaacggttttggaaaacgaaattctgtttgatcgaagaaatgttcttcttggcttaggtggtctttatggtgttgctaatgctataccattagctgcatccgctgctccagctccacctcctgatctctcgtcttgtagtatagccaggattaacgaaaatcaggtggtgccgtacagttgttgcgcgcctaagcctgatgatatggagaaagtttccgtattacaagttccccttctatgactaagctccgtgttcgtcagcctgctcatatgagggagtata

SEQ ID NO: 1127 - DNA, 513 bp, Artificial
  Mutation introduced by TALE nuclease pair POT32_T03 within a POT32 allele
gcaagcttgtgcaatagtagtagtacatctctcaaaactccttttacttcttcctccacttctttatcttccactcctaagccctctcaacttttcatccatggaaaacgtaaccaaatgttcaaagtttcatgcaaggttaccaataataacggtgaccaaaaccaaaacgttgaaacaaattctgttgatcgaagaaatgttcttcttggcttaggtggtctttatggtgttgctaatgctataccattagctgcatccgctgctccagctccacctcctgatctctcgtcttgtagtatagccaggattaacgaaaatcaggtggtgccgtacagttgttgcgcgcctaagcctgatgatatggagaaagttccgtattacaagttcccttctatgactaagctccgtgttcgtcagcctgctctaatgaggagtatattgccaagtacaatctggcgattagtcgaatgagagatcttgataagacacaacctttaaaccctattggtt

SEQ ID NO: 1128 - DNA, 512 bp, Artificial
  Mutation introduced by TALE nuclease pair POT32_T03 within a POT32 allele
gcaagcttgtgcaatagttgtagtacatccctcaaaactccttttacttcttcctccacttctttaacttccactcctaaaccctctcaacttttcatccatggaaaacgtaaccaaatgttcaaagtttcatgcatggttaccaataataacggtgaccaaaaccaaaacgttgaaacgaattctgttgatcgaagaaatgttcttcttggcttaggtggtctttatggtgttgctaatgctataccattagctgcatccgctactccatctccacctcctgatctctcgtcttgtagtatagccaggattaacgaaactcatgtggtgccgtacagttgttgcgcgcctaagcctgatgatatggagaaagttccgtattacaagttcccttctatgactaagctccgtgttcgtcagcgaagctaatgaggagtatattgtcaagtacaatttggcggttagcaagatgagggatcttgataagacacaacctttaaaccctattggtt

SEQ ID NO: 1129 - DNA, 449 bp, Artificial
  Mutation introduced by TALE nuclease pair POT32_T03 within a POT32 allele
gcaagcttgtgcaatagttgtagtacatccctcaaaacatccttttacttcttcctccacttctttaacttccactcctaaaccctctcaacttttcatccatggaaaacgtaaccaaatgttcaaagtttcatgcaaggttaccaataataacggtgaccaaaaccaaaacgttgaaacgaattctgttgatcgaagaaatgttcttcttggcttaggtggtctttatggtgttgctaatgctataccattagctgcatccgctactccatctccacctcctgatctctcgtcttgtagtatagccaggattaacgaaactcatgtggtgccgtacagttgttgcgcgcctaagcctgatgatatggagaaagttccgtattacaagttcccttctatgactaagctccgtgttcgtcagcctgctcaaatgaggagtatattgccaa

SEQ ID NO: 1130 - DNA, 515 bp, Artificial
  Mutation introduced by TALE nuclease pair POT32_T03 within a POT32 allele
gcaagcttgtgcaatagtagtagtacatctctcaaaactccttttacttcttcctccacttctttatcttccactcctaagcccctctcaacttttcatccatggaaaacgtaaccaaatgttcaaagtttcatgcaaggttaccaataataacggtgaccaaaaccaaaacgttgaaacaaattctgttgatcgaagaaatgttcttcttggcttaggtggtctttatggtgttgctaatgctataccattagctgcatccgctgctccagctccacctcctgatctctcgtcttgtagtatagccaggattaacgaaaatcaggtggtgccgtacagttgttgcgcgcctaagcctgatgatatggagaaagttccgtattacaagttcccttctatgactaagctccgtgttcgtcagcctgctcataatgaggagtatattgccaagtacaatttggcggttagcaagatgagggatcttgataagacacaacctttaaaccctattggtt

SEQ ID NO: 1131 - DNA, 509 bp, Artificial
  Mutation introduced by TALE nuclease pair POT32_T03 within a POT32 allele
gcaagcttgtgcaatagttgtagtacatccctcaaaactccttttacttcttcctccacttctttaacttccactcctaaaccctctcaacttttcatccatggaaaacgtaaccaaatgttcaaagtttcatgcaaggttaccaataataacggtgaccaaaaccaaaacgttgaaacgaattctgttgatcgaagaaatgttcttcttggcttaggtggtctttatggtgttgctaatgctataccattagctgcatccgctactccatctccacctcctgatctctcgtcttgtagtatagccaggattaacgaaactcatgtggtgccgtacagttgttgcgcgcctaagcctgatgatatggagaaagttccgtattacaagttcccttctatgactaagctccgtgttcgtcagcctgctcaaatgaggagtatattgccaagtacaattttggcggttagcaagatgaggggatcttgataagacacaacctttaaacccta

SEQ ID NO: 1132 - DNA, 517 bp, Artificial
  Mutation introduced by TALE nuclease pair POT32_T03 within a POT32 allele
gcaagcttgtgcaatagttgtagtacatccctcaaaactccttttacttcttcctccacttctttaacttccactcctaaaccctctcaacttttcatccatggaaaacgtaaccaaatgttcaaagtttcatgcatggttaccaataataacggtgaccaaaaccaaaacgttgaaacgaattctgttgatcgaagaaatgttcttcttggcttaggtggtctttatggtgttgctaatgctataccattagctgcatccgctactccatctccacctcctgatctctcgtcttgtagtatagccaggattaacgaaactcatgtggtgccgtacagttgttgcgcgcctaagcctgatgatatggagaaagttccgtattacaagttcccttctatgactaagctccgtgttcgtcagcctgctcatctaatgaggagtatattgccaagtacaatttggcggttagcaagatgaggggatcttgataagacacaacctttaaaccctattggtt

SEQ ID NO: 1133 - DNA, 505 bp, Artificial
  Mutation introduced by TALE nuclease pair POT32_T03 within a POT32 allele
gcaagcttgtgcaatagtagtagtacatctctcaaaactccttttacttcttcctccacttctttaacttccactcctaagccctctcaacttttcatccatggaaaacgtaaccaaatgttcaaagtttcatgcaaggttaccaataataacggtgaccaaaaccaaaacgttgaaacgaattctgttgatcgaagaaatgttcttcttggcttaggtggtctttatggtgttgctaatgctataccattagctgcatccgctgctccagctccacctcctgatctctcgtcttgtagtatagccaggattaacgaaaatcaggtggtgccgtacagttgttgcgcgcctaagcctgatgatatggagaaagttccgtattacaagttcccttctatgactaagctccgtgttcgtcagcctgctcatgaggagtatattgccaagtacaatttggcggttagcaagatgagggatcttgataagacacaacctttaaacccta

SEQ ID NO: 1134 - DNA, 515 bp, Artificial
  Mutation introduced by TALE nuclease pair POT32_T03 within a POT32 allele
gcaagcttgtgcaatagtagtagtacatctctcaaaactccttttacttcttcctccacttctttaacttccactcctaagccctctcaacttttcatccatggaaaacgtaaccaaatgttcaaagtttcatgcaaggttaccaataataacggtgaccaaaaccaaaacgttgaaacaaattctgttgatcgaagaaatgttcttcttggcttaggtggtctttatggtgttgctaatgctataccattagctgcatccgctgctccagctccacctcctgatctctcgtcttgtagtatagccaggattaacgaaaatcaggtggtgccgtacagttgttgcgcgcctaagcctgatgatatggagaaagttccgtattacaagttcccttctatgactaagctccgtgttcgtcagcctgctcattaatgaggagtatattgccaagtacaatctggcgattagtcgaatgagagatcttgataagacacaacctttaaaccctattggtt

SEQ ID NO: 1135 - DNA, 512 bp, Artificial
  Mutation introduced by TALE nuclease pair POT32_T03 within a POT32 allele
gcaagcttgtgcaatagtagtagtacatctctcaaaaactccttttacttcttcctccacttctttatcttccactcctaagcccctctcaacttttcatccatggaaaacgtaaccaaatgttcaaagtttcatgcaaggttatcaataataacggtgaccaaaacgttgaaacgaattctgttgatcgaagaaatgttcttcttggcttaggtggtctttatggtgttgctaatgctataccattagctgcatccgctgctccaactccacctcctgatctctcgtcttgtagtatagccaggattaacgaaaatcaggtggtgccgtacagttgttgcgcgcctaagcctgatgatatggagaaagttccgtattacaagttcccttctatgactaagctccgtgttcgtcagcctgctcatctaatgaggagtatattgccaagtacaatctggcgattagtcgaatgagagatcttgataagacacaacctttaaaccctattggtt

SEQ ID NO: 1136 - DNA, 517 bp, Artificial
  Mutation introduced by TALE nuclease pair POT32_T03 within a POT32 allele
gcaagcttgtgcaatagtagtagtacatctctcaaaactccttttacttcttcctccacttctttaacttccactcctaagcccctctcaacttttcatccatggaaaacgtaaccaaatgttcaaagtttcatgcaaggttaccaataataacggtgaccaaaaccaaaacgttgaaacgaattctgttgatcgaagaaatgttcttcttggcttaggtggtctttatggtgttgctaatgctataccattagctgcatccgctgctccagctccacctcctgatctctcgtcttgtagtatagccaggattaacgaaaatcaggtggtgccgtacagttgttgcgcgcctaagcctgatgatatggagaaagttccgtattacaagttcccttctatgactaagctccgtgttcgtcagcctgctcacataatgaggagtatattgccaagtacaatctggcgattagtcgaatgaaagatcttgataagacacaacctttaaaccctattggtt

SEQ ID NO: 1137 - DNA, 523 bp, Artificial
  Mutation introduced by TALE nuclease pair POT32_T03 within a POT32 allele
gcaagcttgtgcaatagtagtagtacatctctcaaaactcctttttacttcttcctccacttctttatcttccactcctaagcccctctcaacttttcatccatggaaaacgtaaccaaatgttcaaagtttcatgcaaggttaccaataataacggtgaccaaaaccaaaacgttgaaacgaattctgttgatcgaagaaatgttcttcttggcttaggtggtctttatggtgttgctaatgctataccattagctgcatccgctgctccagctccacctcctgatctctcgtcttgtagtatagccaggattaacgaaaatcaggtggtgccgtacagttgttgcgcgcctaagcctgatgatatggagaaagttccgtattacaagttcccttctatgactaagctccgtgttcgtcagcctgctcatgtcatgatcattgggatctagatgcattcgcgaggtaccgagctcgaattcactgggccgtcgtttttacaacgtcgtgactgggaaaaccc

SEQ ID NO: 1138 - DNA, 500 bp, Artificial
  Mutation introduced by TALE nuclease pair POT32_T03 within a POT32 allele
gcaagcttgtgcaatagtagtagtaccactctcaaaactccttttacttcttcctccacttctttatcttccactcctaagcccctctcaacttttcctccatggaaaacgtaacaaaacgttcaaagtttcatgcaaggttaccaataataacggtgaccaaaacgttgaaacgaattctgttgatcgaagaaatgttcttcttggcttaggtggtctttatggtgttgctaatgctataccattagctgcatccgctactccagctccacctcctgatctctcatcttgtagtaaagcaaagattaatgaaactacggaggtgccatacagttgttgcgctcccacgccaaaagatatgaagaaagttccatattacaagttcccttctatgactaagctccgtattcgtccccctgctctgaggagtatattgccaagtacaatttggcggttagcaagatgaggggatcttgataagacacaacctttaaacccta

SEQ ID NO: 1139 - DNA, 518 bp, Artificial
  Mutation introduced by TALE nuclease pair POT32_T03 within a POT32 allele
gcaagcttgtgcaatagttgtagtacatctctcaaaactccttttacttcttcctccacttctttaacttccactcctaaaccctctcaacttttcatccatggaaaacgtaaccaaatgttcaaagtttcatgcaaggttaccaataataacggtgaccaaaaccaaaacgttgaaacgaattctgttgatcgaagaaatgttcttcttggcttaggtggtctttatggtgttgctaatgctataccattagctgcatccgctgctccagctccacctcctgatctctcgtcttgtagtatagccaggattaacgaaaactcaggtggtgccgtacagttgttgcgcgcctaaagcctgatgatatggagaaagttccgtattacaagttcccttctatgactaagctccgtgttcgtcagcctgctcatctaatgaggagtatattgccaagtacaatctggcgattagtcgaatgaaagatcttgataagacacaacctttaaaccctattggtt

SEQ ID NO: 1140 - DNA, 498 bp, Artificial
  Mutation introduced by TALE nuclease pair POT32_T03 within a POT32 allele
gcaagcttgtgcaatagttgtagtacatctctcaaaactccttttacttcttcctccacttctttaacttccactcctaaaccctctcaacttttcatccatggaaaacgtaaccaaatgttcaaagtttcatgcaaggttaccaataataacggtgaccaaaaccaaaacgttgaaacgaattctgttgatcgaagaaatgttcttcttggcttaggtggtctttatggtgttgcatatgctataccattagctgcatccgctactccatctccacctcctgatctctcgtcttgtagtatagccaggattaacgaaactcatgtggtgccgtacagttgttgcgcgcctaagcctgatgatatggagaaagttccgtattacaagttcccttctatgactaagctccgtgttcgtcagccggagtatattgccaagtacaattttggcggttagcaagatgaggggatcttgataagacacaacctttaaacccta

SEQ ID NO: 1141 - DNA, 514 bp, Artificial
  Mutation introduced by TALE nuclease pair POT32_T03 within a POT32 allele
gcaagcttgtgcaatagtagtagtacatctctcaaaactccttttacttcttcctccacttctttatcttccactcctaagcccctctcaacttttcatccatggaaaacgtaaccaaatgttcaaagtttcatgcaaggttaccaataataacggtgaccaaaaccaaaacgttgaaacaaattctgttgatcgaagaaatgttcttcttggcttaggtggtctttatggtgttgctaatgctataccattagctgcatccgctgctccagctccacctcctgatctctcgtcttgtagtatagccaggattaacgaaaatcaggtggtgccgtacagttgttgcgcgcctaagcctgatgatatggagaaagttccgtattacaagttcccttctatgactaagctccgtgttcgtcagcctgctcacataatgaggagtatattgccaagtacaatctggcgattagtcgaatgaaagatcttgataagacacaacctttaaaccctactt

SEQ ID NO: 1142 - DNA, 510 bp, Artificial
  Mutation introduced by TALE nuclease pair POT32_T03 within a POT32 allele
  misc_feature (154): n is a or c or t or g
gcaagcttgtgcaatagtagtagtacatctctcaaaactccttttacttcttcctccacttctttatcttccactcctaagcccctctcaacttttcatccatggaaaacgtaaccaaatgttcaaagtttcatgcaaggttacataataacgngcaaaccaaaacagttgaaacaaattctgttgatcgaagaaatgttcttcttggcttaggtggtctttatggtgttgctaatgctataccattagctgcatccgctgctccaactccacctcctgatctctcgtcttgtagtatagccaggattaacgaaaatcaggtggtgccgtacagttgttgcgcgcctaagcctgatgatatggagaaagttccgtattacaagttcccttctatgactaagctccgtgttcgtcagcctgctcctaatgaggagtatattgccaagtacaatctggcgattagtcgaatgagagatcttgataagacacaacctttaaaccctattggtt

SEQ ID NO: 1143 - DNA, 516 bp, Artificial
  Mutation introduced by TALE nuclease pair POT32_T03 within a POT32 allele
gcaagcttgtgcaatagtagtagtacatctctcaaaactccttttacttcttcctccacttctttaacttccactcctaagccctctcaacttttcatccatggaaaacgtaaccaaatgttcaaagtttcatgcaaggttaccaataataacggtgaccaaaaccaaaacgttgaaacgaattctgttgatcgaagaaatgttcttcttggcttaggtggtctttatggtgttgctaatgctataccattagctgcatccgctgctccagctccacctcctgatctctcgtcttgtagtatagccaggattaacgaaaatcaggtggtgccgtacagttgttgcgcgcctaagcctgatgatatggagaaagttccgtattacaagttcccttctatgactaagctccgtgttcgtcagcctgctcgctaatgaggagtatattgccaagtacaatctggcgattagtcgaatgaaagatcttgataagacacaacctttaaagccctattggtt

SEQ ID NO: 1144 - DNA, 503 bp, Artificial
  Mutation introduced by TALE nuclease pair POT32_T03 within a POT32 allele
gcaagcttgtgcaatagtagtagtacatctctcaaaactccttttacttcttcctccacttctttaacttccactcctaagcccctctcaacttttcatccatggaaaacgtaaccaaatgttcaaagtttcatgcaaggttaccaataataacggtgaccaaaaccaaaacgttgaaacgaattctgttgatcgaagaaatgttcttcttggcttaggtggtctttatggtgttgctaatgctataccattagctgcatccgctgctccagctccacctcctgatctctcgtcttgtagtatagccaggattaacgaaaatcaggtggtgccgtacagttgttgcgcgcctaagcctgatgatatggagaaagttccttattacaagttcccttctatgactaagctccgtgttcgtcagcctgctcaaatgaggagtatattgccaagtacaatctggcgattagtcgaatgaaagatcttgataagacacaacctttaaa

SEQ ID NO: 1145 - DNA, 498 bp, Artificial
  Mutation introduced by TALE nuclease pair POT32_T03 within a POT32 allele
gcaagcttgtgcaatagtagtagtacatctctcaaaactccttttacttcttcctccacttctttaacttccactcctaagcccctctcaacttttcatccatggaaaacgtaaccaaatgttcaaagtttcatgcaaggttaccaataataacggtgaccaaaaccaaaacgttgaaacgaattctgttgatcgaagaaatgttcttcttggcttaggtggtctttatggtgttgctaatgctataccattagccgcatccgctgctccagctccacctcctgatctctcgtcttgtagtatagccaggattaacgaaaatcaggtggtgccgtacagttgttgcgcgcctaagcctgatgatatggagaaagttccgtattacaagttcccttctatgactaagctccgtgttcgtcagcctgctcaggctaatgaggagtatattgccaagtacaatctggcgatctagtcgaatgaaagatcttgataagacac

SEQ ID NO: 1146 - DNA, 500 bp, Artificial
  Mutation introduced by TALE nuclease pair POT32_T03 within a POT32 allele
gcaagcttgtgcaatagtagtagtacatctctcaaaactccttttacttcttcctccacttctttaacttccactcctaagcccctctcaacttttcatccatggaaaacgtaaccaaatgttcaaagtttcatgcaaggttaccaataataacggtgaccaaaaccaaaacgttgaaacgaattctgttgatcgaagaaatgttcttcttggcttaggtggtctttatggtgttgctaatgctataccattagctgcatccgctgctccagctccacctcctgatctctcgtcttgtagtatagccaggattaacgaaaatcaggtggtgccgtacagttgttgcgcgcctaagcctgatgatatggagaaagttccgtattacaagttcccttctatgactaagctccgtgttcgtcagcctgctcatgaatgaggagtatattgccaagtacaatttggcggttagcaagatgaggggatcttgataagacacaacc

SEQ ID NO: 1147 - DNA, 503 bp, Artificial
  Mutation introduced by TALE nuclease pair POT32_T03 within a POT32 allele
gcaagcttgtgcaatagtagtagtacatctctcaaaactccttttacttcttcctccacttctttatcttccactcctaagccctctcaacttttcatccatggaaaacgtaaccaaatgttcaaagtttcatgcaaggttaccaataataacggtgaccaaaaccaaaacgttgaaacaaattctgttgatcgaagaaatgttcttcttggcttaggtggtctttatggtgttgctaatgctataccattagctgcatccgctgctccagctccacctcctgatctctcgtcttgtagtatagccaggattaacgaaaatcaggtggtgccgtacagttgttgcgcgcctaagcctgatgatatggagaaagttccgtattacaagttcccttctatgactaagctccgtgttcgtcagcctgctcataatgaggagtatattgccaagtacaattttggcggttagcaagatgaggggatcttgataagacacaacctttt

SEQ ID NO: 1148 - DNA, 462 bp, Artificial
  Mutation introduced by TALE nuclease pair POT32_T03 within a POT32 allele
gcaagcttgtgcaatagtagtagtacatctctcaaaactccttttacttcttcctccacttctttacttccactcctaagccctctcaacttttcatccatggaaaacgtaaccaaatgttcaaagtttcatgcaaggttaccaataataacggtgaccaaaaccaaaacgttgaaacgaattctgttgatcgaagaaatgttcttcttggcttaggtggtctttatggtgttgctaatgctataccattagctgcatccgctgctccagctccacctcctgatctctcgtcttgtagtatagccaggattaacgaaaatcaggtggtgccgtacagttgttgcgcgcctaagcctgatgatatggagaaagttccgtattacaagttcccttctatgactaagctccgtgttcgtcagcctgctcatgataatgaggagtatattgccaagtacaattgcg

SEQ ID NO: 1149 - DNA, 493 bp, Artificial
  Mutation introduced by TALE nuclease pair POT32_T03 within a POT32 allele
gcaagcttgtgcaatagtagtagtacatctctcaaaactccttttacttcttcctccacttctttatcttccactcctaagccctctcaacttttcatccatggaaaacgtaaccaaatgttcaaagtttcatgcaaggttaccaataataacggtgaccaaaaccaaaacgttgaaacgaattctgttgatcgaagaaatgttcttcttggcttaggtggtctttatggtgttgctaatgctataccattagctgcatccgctgctccagctccacctcctgatctctcgtcttgtagtatagccaggattaacgaaaatcaggtggtgccgtacagttgttgcgcgcctaagcctgatgatatggagaaagttccgtattacaagttcccttctatgactaagctccgtgttcgtcagcctgctcaatgaggagtatattgccaagtacaatctggcgattagtcgaatgaaagatcttgataagacacaa

SEQ ID NO: 1150 - DNA, 505 bp, Artificial
  Mutation introduced by TALE nuclease pair POT32_T03 within a POT32 allele
gcaagcttgtgcaatagttgtagtacatctctcaaaactccttttacttcttcctccacttctttaacttccactcctaaaccctctcaacttttcatccatggaaaacgtaaccaaatgttcaaagtttcatgcaaggttaccaataataacggtgaccaaaaccaaaacgttgaaacgaattctgttgatcgaagaaatgttcttcttggcttaggtggtctttatggtgttgctaatgctataccattagctgcatccgctactccatctccacctcctgatctctcgtcttgtagtatagccaggattaacgaaactcatgtggtgccgtacagttgttgcgcgcctaagcctgatgatatggagaaagttccgtattacaagttcccttctatgactaagctccgtgttcgtcagcctgctcatgaggagtatattgccaagtacaatttggcggttagcaagatgagggatcttgataagacacaacctttaaacccta

SEQ ID NO: 1151 - DNA, 493 bp, Artificial
  Mutation introduced by TALE nuclease pair POT32_T03 within a POT32 allele
gcaagcttgtgcaatagtagtagtacatctctcaaaactccttttacttcttcctccacttctttatcttccactcctaagcccctctcaacttttcatccatggaaaacgtaaccaaatgttcaaagtttcatgcaaggttatcaataataacggtgaccaaaacgttgaaacgaattctgttgatcgaagaaatgttcttcttggcttaggtggtctttatggtgttgctaatgctataccattagctgcatccgctgctccaactccacctcctgatctctcgtcttgtagtatagccaggattaacgaaaatcaggtggtgccgtacagttgttgcgcgcctaagcctgatgatatggagaaagttccgtattacaagttcccttctatgactaagctccgtgttcgtcagcctgctcactaatgaggagtatattgccaagtacaatctggcgattagtcgaatgagagatcttgataagacacaacc

SEQ ID NO: 1152 - DNA, 455 bp, Artificial
  Mutation introduced by TALE nuclease pair POT32_T03 within a POT32 allele
gcaagcttgtgcaatagtagtagtacatctctcaaaactccttttacttcttcctccacttctttaacttccactcctaaaccctctcaacttttcatccatggaaaacgtaaccaaatgttcaaagtttcatgcaaggttaccaataataacggtgaccaaaaccaaaacgttgaaacgaattctgttgatcgaagaaatgttcttcttggcttgtggtcttatgtgttgctaatgactataccattagctgcatccgctactccatctccacctcctgatctctcgtcttgtagtatagccaggattaacgaaaactcatgtggtgccgtacagttgttgcgcgcctaagcctgatgatatggagaaagttccgtattacaagttcccttctatgactaagctccgtgttcgtcagcctgctcacataatgaggagtatattgccaagtacaa

SEQ ID NO: 1153 - DNA, 500 bp, Artificial
  Mutation introduced by TALE nuclease pair POT32_T03 within a POT32 allele
gcaagcttgtgcaatagtagtagtacatctctcaaaactccttttacttcttcctccacttctttaacttccactcctaagcccctctcaacttttcatccatggaaaacgtaaccaaatgttcaaagtttcatgcaaggttaccaataataacggtgaccaaaaccaaaacgttgaaacgaattctgttgatcgaagaaatgttcttcttggcttaggtggtctttatggtgttgctaatgctataccattagctgcatccgctgctccaactccacctcctgatctctcgtcttgtagtatagccaggattaacgaaaatcaggtggtgccgtacagttgttgcgcgcctaagcctgatgatatggagaaagttccgtattacaagttcccttctatgactaagctccgtgttcgtcagcctgctcaatgaggagtatattgccaaagtacaatctggcgattagtcgaatgagagatcttgataagacacaaccttt

SEQ ID NO: 1154 - DNA, 488 bp, Artificial
  Mutation introduced by TALE nuclease pair POT32_T03 within a POT32 allele
gcaagcttgtgcaatagtagtagtacatctctcaaaactccttttacttcttcctccacttctttatcttccactcctaagccctctcaacttttcatccatggaaaacgtaaccaaatgttcaaagtttcatgcaaggttaccaataataacggtgaccaaaaccaaaacgttgaaacaaattctgttgatcgaagaaatgttcttcttggcttaggtggtctttatggtgttgctaatgctataccattagctgcatccgctgctccagctccacctcctgatctctcgtcttgtagtatagccaggattaacgaaaatcaggtggtgccgtacagttgttgcgcgcctaagcctgatgatatggagaaagttccgtattacaagttcccttctatgactaagctccgtgttcgtcagcctgctcatattgccaagtacaatctggcgattagtcgaatgaaagatcttgataagacacaaccttt

SEQ ID NO: 1155 - DNA, 507 bp, Artificial
  Mutation introduced by TALE nuclease pair POT32_T03 within a POT32 allele
gcaagcttgtgcaatagtagtagtacatctctcaaaactccttttacttcttcctccacttctttatcttccactcctaagcccctctcaacttttcatccatggaaaacgtaaccaaatgttcaaagtttcatgcaaggttaccaataataacggtgaccaaaaccaaaacgttgaaacaaattctgttgatcgaagaaatgttcttcttggcttaggtggtctttatggtgttgctaatgctataccattagctgcatccgctgctccagctccacctcctgatctctcgtcttgtagtatagccaggattaacgaaaatcaggtggtgccgtacagttgttgcgcgcctaagcctgatgatatggagaaagttccgtattacaagttcccttctatgactaagctccgtgttcgtcagccaagctaatgaggagtatattgccaagtacaatttggcggttagcaagatgagggatcttgataagacacaacctttaaacccta

SEQ ID NO: 1156 - DNA, 431 bp, Artificial
  Mutation introduced by TALE nuclease pair POT32_T03 within a POT32 allele
gcaagcttgtgcaatagtagtagtacatctctcaaaactccttttacttcttcctccacttctttatcttccactcctaagcccctctcaacttttcatccatggaaaacgtaaccaaatgttcaaagtttcatgcaaggttaccaataataacggtgaccaaaaccaaaacgttgaaacaaattctgttgatcgaagaaatgttcttcttggcttaggtggtctttatggtgttgctaatgctataccattagctgcatccgctactccatctccacctcctgatctctcgtcttgtagtatagccaggattaacgaaactcatgtggtgccgtacagttgttgcgcgcctaagcctgatgatatggagaaagttttggcggttagcaagatgaggggatcttgataagacacaacctttaaaccctatt

SEQ ID NO: 1157 - DNA, 453 bp, Artificial
  Mutation introduced by TALE nuclease pair POT32_T03 within a POT32 allele
gcaagcttgtgcaatagtagtagtacatctctcaaaactccttttacttcttcctccacttctttaacttccactcctaaaccctctcaacttttcatccatggaaaacgtaaccaaatgttcaaagtttcatgcaaggttaccaataataacggtgaccaaaaccaaaacgttgaaacgaattctgttgatcgaagaaatgttcttcttggcttgtggtcttatggtgttgctaatgactataccattagctgcatccgctactccatctccacctcctgatctctcgtcttgtagtatagccaggattaacgaaaactcatgtggtgccgtacagttgttgcgcgcctaagcctgatgatatggagaaagttccgtattacaagttcccttctatgactaagctccgtgttcgtcagcctgctcactaatgaggagtatattgccaagtac

SEQ ID NO: 1158 - DNA, 457 bp, Artificial
  Mutation introduced by TALE nuclease pair POT32_T03 within a POT32 allele
gcaagcttgtgcaatagttgtagtacatccctcaaaactccttttacttcttcctccacttctttaacttccactcctaaaccctctcaacttttcatccatggaaaacgtaaccaaatgttcaaagtttcatgcatggttaccaataataacggtgaccaaaaccaaaacgttgaaacgaattctgttgatcgaagaaaatgttcttcttggcttaggtggtctttatggtgttgctaatgctataccattagctgcatccgctactccatctccacctcctgatctctcgtcttgtagtatagccaggattaacgaaaactcatgtggtgccgtacagttgttgcgcgcctaaagcctgatgatatggagaaagttccgtattacaaagttcccttctatgactaaagctccgtgttcgtcagcctgctcatatgaggagtatattgccaagtac

SEQ ID NO: 1159 - DNA, 513 bp, Artificial
  Mutation introduced by TALE nuclease pair POT32_T03 within a POT32 allele
gcaagcttgtgcaatagtagtagtacatctctcaaaactccttttacttcttcctccacttctttaacttccactcctaagccctctcaacttttcatccatggaaaacgtaaccaaatgttcaaagtttcatgcaaggttaccaataataacggtgaccaaaaccaaaacgttgaaacgaattctgttgatcgaagaaatgttcttcttggcttaggtggtctttatggtgttgctaatgctataccattagctgcatccgctgctccagctccacctcctgatctctcgtcttgtagtatagccaggattaacgaaactcatgtggtgccgtacagttgttgcgcgcctaagcctgatgatatggagaaagttccgtattacaagttcccttctatgactaagctccgtgttcgtcagcctgctctaatgaggagtatattgccaagtacaatttggcggttagcaagatgagggatcttgataagacacaacctttaaaccctattggtt

SEQ ID NO: 1160 - DNA, 514 bp, Artificial
  Mutation introduced by TALE nuclease pair POT32_T03 within a POT32 allele
gcaagcttgtgcaatagtagtagtacatcctcaacaatccttttacttcttcctccacttctttaacttccactcctaagcccctctcaacttttcatccatggaaaacgtaaccaaatgttcaaagtttcatgcaaggttaccaataataacggtgaccaaaaccaaaacgttgaaacgaattctgttgatcgaagaaatgttcttcttggcttaggtggtctttatggtgttgctaatgctataccattagctgcatccgctactccatctccacctcctgatctctcgtcttgtagtatagccaggattaacgaaactcatgtggtgccgtacagttgttgcgcgcctaagcctgatgatatggagaaagttccgtattacaagttcccttctatgactaagctccgtgttcgtcagcctgctcactaatgaggagtatattgccaagtacaatttggcggttagcagatgagggatcttgataagacacaacctttaaaccctattggtt

SEQ ID NO: 1161 - DNA, 510 bp, Artificial
  Mutation introduced by TALE nuclease pair POT32_T03 within a POT32 allele
  misc_feature (429): n is a or c or t or g
gcaagcttgtgcaatagtagtagtacatctctcaaaactccttttacttcttcctccacttctttatcttccactcctaagcccctctcaacttttcatccatggaaaacgtaaccaaatgttcaaagtttcatgcaaggttaccaataataacggtgaccaaaaccaaaacgttgaaacaattctgttgatcgaagaaatgttcttcttggcttaggtggtctttatggtgttgctaatgctataccattagctgcatccgctgctccagctccacctcctgatctctcgtcttgtagtatagccaggattaacgaaaatcaggtggtgccgtacagttgttgcgcgcctaagcctgatgatatggagaaagttccgtattacaagttcccttctatgactaagctccgtgttcgtcagcctgctcangataatgaggagtatattgccaagtacaatctggcgattagtcgaatgaaagatcttgataagacacaacctttaaaccct

SEQ ID NO: 1162 - DNA, 455 bp, Artificial
  Mutation introduced by TALE nuclease pair POT32_T03 within a POT32 allele
  misc_feature (273): n is a or c or t or g
gcaagcttgtgcaatagtagtagtacatctctcaaaactccttttacttcttcctccacttctttaacttccactcctaagcccctctcaacttttcatccatggaaaacgtaaccaaatgttcaaagtttcatgcaaggttaccaataataacggtgaccaaaaccaaaacgttgaaacgaattctgttgatcgaagaaatgttcttcttggcttaggtggtctttatggtgttgctaatgctataccattagctgcatccgctgctccaantccacctcctgatctctcgtcttgtagtatagccaggattaacgaaactcatgtggtgccgtacagttgttgcgcgcctaagcctgatgatatggagaaagttccgtattacaagttcccttctatgactaagctccgtgttcgtcagcctgctcactaatgaggagtatattgccaagtac

SEQ ID NO: 1163 - DNA, 515 bp, Artificial
  Mutation introduced by TALE nuclease pair POT32_T03 within a POT32 allele
gcaagcttgtgcaatagttgtagtacatccctcaaaacatccttttacttcttcctccacttctttaacttccactcctaaaccctctcaacttttcatccatggaaaacgtaaccaaatgttcaaagtttcatgcatggttaccaataataacggtgaccaaaaccaaaacgttgaaacgaattctgttgatcgaagaaatgttcttcttggcttaggtggtctttatggtgttgctaatgctataccattagctgcatccgctactccatctccacctcctgatctctcgtcttgtagtatagccaggattaacgaaactcatgtggtgccgtacagttgttgcgcgcctaagcctgatgatatggagaaagttccgtattacaagttcccttctatgactaagctccgtgttcgtcagcctgctcataatgaggagtatattgccaagtacaatctggcgattagtcgaatgaaagatcttgataagacacaacctttaaaccctattggtt

SEQ ID NO: 1164 - DNA, 514 bp, Artificial
  Mutation introduced by TALE nuclease pair POT32_T03 within a POT32 allele
  misc_feature (475): n is a or c or t or g
gcaagcttgtgcaatagtagtagtacatctctcaaaactccttttacttcttcctccacttctttatcttccactcctaagcccctctcaacttttcatccatggaaaacgtaaccaaaatgttcaaaagtttcatgcaaggttatcaataataacggtgaccaaaacgttgaaacgaattctgttgatcgaagaaatgttcttcttggcttaggtggtctttatggtgttgctaatgctataccattagctgcatccgctgctccaactccacctcctgatctctcgtcttgtagtatagtccaggattaacgaaaatcaggtggtgccgtacagttgttgcgcgcctaagcctgatgatatggagaaagttccgtattacaagttcccttctatgactaagctccgtgttcgtcagcctgctcagctaatgaggagtatattgccaagtacaatctggcgattagtcgaatgngagatcttgataagacacaacctttaaaccctattggtt

SEQ ID NO: 1165 - DNA, 498 bp, Artificial
  Mutation introduced by TALE nuclease pair POT32_T03 within a POT32 allele
gcaagcttgtgcaatagtagtagtacatctctcaaaactccttttacttcttcctccacttcttttatcttccactcctaagcccctctcaacttttcatccatggaaaacgtaaccaaatgttcaaagtttcatgcaaggttatcaataataacggtgaccaaaacgttgaaacgaattctgttgatcgaagaaatgttcttcttggcttaggtggtctttatggtgttgctaatgctataccattagctgcatccgctactccatctccacctcctgatctctcgtcttgtagtatagccaggattaacgaaactcatgtggtgccgtacagttgttgcgcgcctaagcctgatgatatggagaaagttccgtattacaagttcccttctatgactaagctccgtgttcgtcaagctaatgaggagtatattgccaagtacaatctggcgattagtcgaatgaaagatcttgataagacacaacctttaaacccta

SEQ ID NO: 1166 - DNA, 489 bp, Artificial
  Mutation introduced by TALE nuclease pair POT32_T03 within a POT32 allele
gcaagcttgtgcaatagtagtagtaccactctcaaaactccttttacttcttcctccacttctttatcttccactcctaagcccctctcaacttttcctccatggaaaacgtaacaaaacgttcaaagtttcatgcaaggttaccaataataacggtgaccaaaacgttgaaacgaattctgttgatcgaagaaatgttcttcttggcttaggtggtctttatggtgttgctaatgctataccattagctgcatccgctactccagctccacctcctgatctctcatcttgtagtaaagcaaagattaatgaaactacggaggtgccatacagttgttgcgctcccacgccaaaagatatgaagaaagttccatattacaagttcccttctatgactaaagctccgtattcgtcccctgctctgaggagtatattgccaagtacaatttggcggttagcaagatgaggggatcttgataagacacaacc

SEQ ID NO: 1167 - DNA, 489 bp, Artificial
  Mutation introduced by TALE nuclease pair POT32_T03 within a POT32 allele
gcaagcttgtgcaatagttgtagtacatccctcaaaactccttttacttcttcctccacttctttaacttccactcctaaacccctctcaacttttcatccatggaaaacgtaaccaaatgttcaaagtttcatgcatggttaccaataataacggtgaccaaaaccaaaacgttgaaacgaattctgttgatcgaagaaatgttcttcttggcttaggtggtctttatggtgttgctaatgctataccattagctgcatccgctactccatctccacctcctgatctctcgtcttgtagtatagccaggattaacgaaactcatgtggtgccgtacagttgttgcgcgcctaagcctgatgatatggagaaagttccgtattacaagttcccttctatgactaagctccgtgttcgtcagccttaatgaggagtatatttgccaaagtacaattttgggcgggttagcaagatgagggggatcttgat

SEQ ID NO: 1168 - DNA, 516 bp, Artificial
  Mutation introduced by TALE nuclease pair POT32_T03 within a POT32 allele
gcaagcttgtgcaatagtagtagtacatctctcaaaactccttttacttcttcctccacttctttaacttccactcctaaaccctctcaacttttcatccatggaaaacgtaaccaaatgttcaaagtttcatgcaaggttaccaataataacggtgaccaaaaccaaaacgttgaaacgaattctgttgatcgaagaaatgttcttcttggcttaggtggtctttatggtgttgctaatgctataccattagctgcatccgctactccatctccacctcctgatctctcgtcttgtagtatagccaggattaacgaaactcatgtggtgccgtacagttgttgcgcgcctaagcctgatgatatggagaaagttccgtattacaagttcccttctatgactaagctccgtgttcgtcagcctgctcataatgaggagtatattgccaagtacaatttggcggttagcaagatgaggggatcttgataagacacaaccttttaaaccctattggtt

SEQ ID NO: 1169 - DNA, 516 bp, Artificial
  Mutation introduced by TALE nuclease pair POT32_T03 within a POT32 allele
gcaagcttgtgcaatagtagtagtacatctctcaaaactccttttacttcttcctccacttctttaacttccactcctaagccctctcaacttttcatccatggaaaacgtaaccaaatgttcaaagtttcatgcaaggttaccaataataacggtgaccaaaaccaaaacgttgaaacgaattctgttgatcgaagaaatgttcttcttggcttaggtggtctttatggtgttgctaatgctataccattagctgcatccgctgctccagctccacctcctgatctctcgtcttgtagtatagccaggattaacgaaaatcaggtggtgccgtacagttgttgcgcgcctaagcctgatgatatggagaaagttccgtattacaagttcccttctatgactaagctccgtgttcgtcagcctgctcagctaatgaggagtatattgccaagtacaatcttgcgattagtcgaatgaaagatcttgataagacacaacctttaaaccctattggtt

SEQ ID NO: 1170 - DNA, 484 bp, Artificial
  Mutation introduced by TALE nuclease pair POT32_T03 within a POT32 allele
gcaagcttgtgcaatagtagtagtacatctctcaaaactccttttacttcttcctccacttctttatcttccactcctaagcccctctcaacttttcatccatggaaaacgtaaccaaatgttcaaagtttcatgcaaggttaccaataataacggtgaccaaaaccaaaacgttgaaacaaaattctgttgatcgaagaaatgttcttcttggcttaggtggtctttatggtgttgctaatgctataccattagctgcatccgctgctccagctccacctcctgatctctcgtcttgtagtatagccaggattaacgaaaagtcaggtggtgccgtacagttgttgcgcgcctaagcctgatgatatggagaaaggttccgtattacaagttcccttctatgactaagctccgtgttcgtcagcctgcactaatgaggagtatattgccaaggtacaatctggcgattagtcgaatgaaatga

SEQ ID NO: 1171 - DNA, 522 bp, Artificial
  Mutation introduced by TALE nuclease pair POT32_T03 within a POT32 allele
gcaagcttgtgcaatagtagtagtacatctctcaaaactccttttacttcttcctccacttctttatcttccactcctaagcccctctcaacttttcatccatggaaaacgtaaccaaatgttcaaagtttcatgcaaggttaccaataataacggtgaccaaaaccaaaacgttgaaacgaattctgttgatcgaagaaatgttcttcttggcttaggtggtctttatggtgttgctaatgctataccattagctgcatccgctactccatgctccacctcctgatctctcgtcttgtagtatagccaggattaacgaaaactcatggtggtgccgtacagttgttgcgcgcctaagcctgatgatatggagaaagttccgtattacaagttcccttctatgactaagctccgtgttcgtcagcctgctcagcataatgaggagtatattgccaagtacaatttggcggttagcaagatgaggggatcttgataagacacaacctttaaaccctattggtt

SEQ ID NO: 1172 - DNA, 597 bp, Artificial
  Mutation introduced by TALE nuclease pair POT32_T03 within a POT32 allele
gcaagcttgtgcaatagtagtagtacatctctcaaaactccttttacttcttcctccacttctttatcttccactcctaagccctctcaacttttcatccattggaaaacgataaccaatgttcaagtttcatgcaaggttacaataataacggtgaccaaaaccaaaacgttgaaacgaattctgttgatcgaagaaatgttcttcttggcttaggtggtctttatggtgttgctaatgctataccattagctgcatccgctgctccagctccacctcctgatctctcgtcttgtagtatagccaggattaacgaaaatcaggtggtgccgtacagttgttgcgcgcctaagcctgatgatatggagaaagttccgtattacaagttcccttctatgactaagctccgtgttcgtcagcctgctcatccctttttcactgcatccagcgcaggacgcccgccgaggcaggccaaggcgacgaggtggtcgttggtcaacgcggccaacgccggatcaaatgaggagtatattgccaagtacaatttggcggttagcaagatgagggatcttgataagacacaacctttaaacccta

SEQ ID NO: 1173 - DNA, 534 bp, Artificial
  Mutation introduced by TALE nuclease pair POT32_T03 within a POT32 allele
gcaagcttgtgcaatagtagtagtacatctctcaaaactccttttacttcttcctccacttctttatcttccactcctaagcccctctcaacttttcatccatggaaaacgtaaccaaatgttcaaagtttcatgcaaggttaccaataataacggtgaccaaaaccaaaacgttgaaacaaattctgttgatcgaagaaatgttcttcttggcttaggtggtctttatggtgttgctaatgctataccattagctgcatccgctgctccagctccacctcctgatctctcgtcttgtagtatagccaggattaacgaaaatcaggtggtgccgtacagttgttgcgcgcctaagcctgatgatatggagaaagttccgtattacaagttcccttctatgactaagctccgtgttcgtcagcctgctgcatttctgggtgagcaaaacaggaaggcaaataatgaggagtatattgccaagtacaatctggcgattagtcgaatgaaagatcttgataagacacaacctttaaa

SEQ ID NO: 1174 - DNA, 592 bp, Artificial
  Mutation introduced by TALE nuclease pair POT32_T03 within a POT32 allele
gcaagcttgtgcaatagtagtagtacatctctcaaaactccttttacttcttcctccacttctttatcttccactcctaagcccctctcaacttttcatccatggaaaacgtaaccaaatgttcaaagtttcatgcaaggttaccaataataacggtgaccaaaaccaaaacgttgaaacaaattctgttgatcgaagaaatgttcttcttggcttaggtggtctttatggtgttgctaatgctataccattagctgcatccgctgctccagctccacctcctgatctctcgtcttgtagtatagccaggattaacgaaaatcaggtggtgccgtacagttgttgcgcgcctaagcctgatgatatggagaaagttccgtattacaagttcccttctatgactaagctccgtgttcgtcagcctgctcatggattaagttgggtaacgccagggttttcccagtcacgacgttgtaaaacgacggccagtgaattcgagctcggtacctcgaaaatgaggagtatattgccaagtacaatttggcggttagcaagatgagggatcttgataagacacaacctttaaaaccta

SEQ ID NO: 1175 - DNA, 559 bp, Artificial
  Mutation introduced by TALE nuclease pair POT32_T03 within a POT32 allele
gcaagcttgtgcaatagttgtagtacatccctcaacatccttttacttcttcctccacttctttaacttccactcctaaaccctctcaacttttcatccatggaaaacgtaaccaaatgttcaaagtttcatgcatggttaccaataataacggtgaccaaaaccaaaacgttgaaacgaattctgttgatcgaagaaatgttcttcttggcttaggtggtctttatggtgttgctaatgctataccattagctgcatccgctactccatctccacctcctgatctctcgtcttgtagtatagccaggattaacgaaactcatgtggtgccgtacagttgttgcgcgcctaagcctgatgatatggagaaagttccgtattacaagttcccttctatgactaagctccgtgttcgtcagcctgctcatgatgccgcatagttaagccagccccgacacccgccaacacccgctgacgcctaatgaggagtatattgccaagtacaatttggcggttagcaagatgagggatcttgataagacacaacctttaaacccta

SEQ ID NO: 1176 - DNA, 598 bp, Artificial
  Mutation introduced by TALE nuclease pair POT32_T03 within a POT32 allele
gcaagcttgtgcaatagtagtagtacatccctcaaaactccttttacttcttcctccacttctttaacttccactcctaaaccctctcaacttttcatccatggaaaacgtaaccaaatgttcaaagtttcatgcatggttaccaataataacggtgaccaaaaccaaaacgttgaaacgaattctgttgatcgaagaaatgttcttcttggcttaggtggtctttatggtgttgctaatgctataccattagctgcatccgctactccatctccacctcctgatctctcgtcttgtagtatagccaggattaacgaaactcatgtggtgccgtacagttgttgcgcgcctaagcctgatgatatggagaaagttccgtattacaagttcccttctatgactaagctccgtgttcgtcagcctgctcaactccggcggctacaacctgcccatcggccaggccgacgaaatgcagaggtacgtggaggagaaccagaccaggaacaagcaaataatgaggagtatattgccaagtacaatctggcgattagtcgaatgaaagatcttgataagacacaacctttaaaccctattggtt

SEQ ID NO: 1177 - DNA, 551 bp, Artificial
  Mutation introduced by TALE nuclease pair POT32_T03 within a POT32 allele
gcaagcttgtgcaatagtagtagtacatctctcaaaactccttttacttcttcctccacttctttatcttccactcctaagcccctctcaacttttcatccatggaaaacgtaaccaaatgttcaaagtttcatgcaaggttaccaataataacggtgaccaaaaccaaaacgttgaaacgaattctgttgatcgaagaaatgttcttcttggcttaggtggtctttatggtgttgctaatgctataccattagctgcatccgctgctccagctccacctcctgatctctcgtcttgtagtatagccaggattaacgaaaatcaggtggtgccgtacagttgttgcgcgcctaagcctgatgatatggagaaagttccgtattacaagttcccttctatgactaagctccgtgttcgtcagcctgctcatgacgctcagtggaacgaaactcacgttaagggattttggtcctaatgaggagtatattgccaagtacaatttggcggttagcaagatgaggatcttgataagacacaacctttaaacccta

SEQ ID NO: 1178 - DNA, 524 bp, Artificial
  Mutation introduced by TALE nuclease pair POT32_T03 within a POT32 allele
gcaagcttgtgcaatagttgtagtacatctctcaaaactccttttacttcttcctccacttctttaacttccactcctaaaccctctcaacttttcatccatggaaaacgtaaccaaatgttcaaagtttcatgcaaggttaccaataataacggtgaccaaaaccaaaacgttgaaacgaattctgttgatcgaagaaatgttcttcttggcttaggtggtctttatggtgttgctaatgctataccattagctgcatccgctactccatctccacctcctgatctctcgtcttgtagtatagccaggattaacgaaactcatgtggtgccgtacagttgttgcgcgcctaagcctgatgatatggagaaagttccgtattacaagttcccttctatgactaagctccgtgttcgtcagcctgctcatgaagatgctaatgaggagtatattgccaagtacaatttggcggttagcaagatgagggatcttgataagacacaaccttttaaaccctattggtt

SEQ ID NO: 1179 - DNA, 553 bp, Artificial
  Mutation introduced by TALE nuclease pair POT32_T03 within a POT32 allele
gcaagcttgtgcaatagtagtagtacatctctcaaaactccttttacttcttcctccacttctttatcttccactcctaagcccctctcaacttttcatccatggaaaacgtaaccaaatgttcaaagtttcatgcaaggttaccaataataacggtgaccaaaaccaaaacgttgaaacgaattctgttgatcgaagaaatgttcttcttggcttaggtggtctttatggtgttgctaatgctataccattagctgcatccgctgctccagctccacctcctgatctctcgtcttgtagtatagccaggattaacgaaaatcaggtggtgccgtacagttgttgcgcgcctaagcctgatgatatggagaaagttccgtattacaagttcccttctatgactaagctccgtgttcgtcagcctgctcatgacgctcagtggaacgaaaactcacgttaagggattttggtcctaatgaggagtatattgccaagtacaatttggcggttagcaagatgagggatcttgataagacacaacctttaaacccta

SEQ ID NO: 1180 - DNA, 594 bp, Artificial
  Mutation introduced by TALE nuclease pair POT32_T03 within a POT32 allele
gcaagcttgtgcaatagtagtagtacatctctcaaaactccttttacttcttcctccacttctttatcttccactcctaagcccctctcaacttttcatccatggaaaacgtaaccaaatgttcaaagtttcatgcaaggttaccaataataacggtgaccaaaaccaaaacgttgaaacaaattctgttgatcgaagaaatgttcttcttggcttaggtggtctttatggtgttgctaatgctataccattagctgcatccgctgctccagctccacctcctgatctctcgtcttgtagtatagccaggattaacgaaaatcaggtggtgccgtacagttgttgcgcgcctaagcctgatgatatggagaaagttccgtattacaagttcccttctatgactaagctccgtgttcgtcagcctgctcatggattaagttgggtaacgccaggggtttttcccagtcacgacgttgtaaaacgacggccagtgaattcgagctcggtacctcgaaaatgaggagtatattgccaagtacaatttggcggttagcaagatgagggatcttgataagacacaacctttaaaaccta

SEQ ID NO: 1181 - DNA, 541 bp, Artificial
  Mutation introduced by TALE nuclease pair POT32_T03 within a POT32 allele
gcaagcttgtgcaatagtagtagtacatctctcaaaactccttttacttcttcctccacttctttatcttccactcctaagcccctctcaacttttcatccatggaaaacgtaaccaaatgttcaaagtttcatgcaaggttaccaataataacggtgaccaaaaccaaaacgttgaaacaaattctgttgatcgaagaaatgttcttcttggcttaggtggtctttatggtgttgctaatgctataccattagctgcatccgctgctccagctccacctcctgatctctcgtcttgtagtatagccaggattaacgaaaatcaggtggtgccgtacagttgttgcgcgcctaagcctgatgatatggagaaagttccgtattacaagttcccttctatgactaagctccgtgttcgtcagcctgctcagccacgatggcggcaagcaggcgctggagctaatgaggagtatattgccaagtacaatttggcggttagcaagatgagggatcttgataagacacaacctttaaaccctatt

SEQ ID NO: 1182 - DNA, 599 bp, Artificial
  Mutation introduced by TALE nuclease pair POT32_T03 within a POT32 allele
gcaagcttgtgcaatagtagtagtacatccctcaaaactccttttacttcttcctccacttctttaacttccactcctaaacccctctcaacttttcatccatggaaaacgtaaccaaatgttcaaagtttcatgcatggttaccaataataacggtgaccaaaaccaaaacgttgaaacgaattctgttgatcgaagaaatgttcttcttggcttaggtggtctttatggtgttgctaatgctataccattagctgcatccgctactccatctccacctcctgatctctcgtcttgtagtatagccaggattaacgaaactcatgtggtgccgtacagttgttgcgcgcctaagcctgatgatatggagaaagttccgtattacaagttcccttctatgactaagctccgtgttcgtcagcctgctcaactccggcggctacaacctgcccatcggccaggccgacgaaatgcagaggtacgtggaggagaaccagaccaggaacaagcaaataatgaggagtatattgccaagtacaatctggcgattagtcgaatgaaagatcttgataagacacaacctttaaaccctattggtt

SEQ ID NO: 1183 - DNA, 522 bp, Artificial
  Mutation introduced by TALE nuclease pair POT32_T03 within a POT32 allele
gcaagcttgtgcaatagttgtagtacatccctcaacatccttttacttcttcctccacttctttaacttccactcctaaaccctctcaacttttcatccatggaaaacgtaaccaaatgttcaaagtttcatgcatggttaccaataataacggtgaccaaaaccaaaacgttgaaacgaattctgttgatcgaagaaatgttcttcttggcttaggtggtctttatggtgttgctaatgctataccattagctgcatccgctactccatctccacctcctgatctctcgtcttgtagtatagccaggattaacgaaactcatgtggtgccgtacagttgttgcgcgcctaagcctgatgatatggagaaagttccgtattacaagttcccttctatgactaagctccgtgttcgtcagcctgctcatgaagaagctaatgaggagtatattgccaagtacaatttggcggttagcaagatgagggatcttgataagacacaacctttaaaccctattggtt

SEQ ID NO: 1184 - DNA, 586 bp, Artificial
  Mutation introduced by TALE nuclease pair POT32_T03 within a POT32 allele
  misc_feature (155): n is a or c or t or g
gcaagcttgtgcaatagtagtagtacatctctcaaaactccttttacttcttcctccacttctttatcttccactcctaagcccctctcaacttttcatccatggaaaacgtaaccaaatgttcaaagtttcatgcaggtatgtcaatcaataangacggtgacccaaaaacgttgaaacgaattctgttgatcgaagaaatgttcttcttggcttaggtggtctttatggtgttgctaatgctataccattagctgcatccgctgctccaactccacctcctgatctctcgtcttgtagtatagccaggattaacgaaaatcaggtggtgccgtacagttgttgcgcgcctaagcctgatgatatggagaaagttccgtattacaagttcccttctatgactaagctccgtgttcgtcagcctgctccgctggctggtttattgctgataaatctggagccggtgagcgtgggtctcgcggtatcattgcagcactggggccagaatgaggagtatattgccaagtacaatctggcgattagtcgaatgagagatcttgataagacacaacctttaaaccctatt

SEQ ID NO: 1185 - DNA, 634 bp, Artificial
  Mutation introduced by TALE nuclease pair POT32_T03 within a POT32 allele
gcaagcttgtgcaatagtagtagtacatctctcaaaactccttttacttcttcctccacttctttatcttccactcctaagcccctctcaacttttcatccatggaaaacgtaaccaaatgttcaaagtttcatgcaaggttaccaataataacggtgaccaaaaccaaaacgttgaaacgaattctgttgatcgaagaaatgttcttcttggcttaggtggtctttatggtgttgctaatgctataccattagctgcatccgctgctccagctccacctcctgatctctcgtcttgtagtatagccaggattaacgaaaatcaggtggtgccgtacagttgttgcgcgcctaagcctgatgatatggagaaagttccgtattacaagttcccttctatgactaagctccgtgttcgtcagcctgctcatgtcatgatcattggatctagatgcattcgcgaggtaccgagctcgaattcactggccgtcgttttacaacgtcgtgactgggaaaaccctggcgttacccaacttaatcatgaggagtatattgccaagtacaatttgggcggttagcaagatgagggatcttgataagacacaacctttaaaccctatggttctgagactgcc

SEQ ID NO: 1186 - DNA, 597 bp, Artificial
  Mutation introduced by TALE nuclease pair POT32_T03 within a POT32 allele
gcaagcttgtgcaatagtagtagtacatccctcaacatccttttacttcttcctccacttctttaacttccactcctaaaccctctcaacttttcatccatggaaaacgtaaccaaatgttcaaagtttcatgcatggttaccaataataacggtgaccaaaaccaaaacgttgaaacgaattctgttgatcgaagaaatgttcttcttggcttaggtggtctttatggtgttgctaatgctataccattagctgcatccgctactccatctccacctcctgatctctcgtcttgtagtatagccaggattaacgaaactcatgtggtgccgtacagttgttgcgcgcctaagcctgatgatatggagaaagttccgtattacaagttcccttctatgactaagctccgtgttcgtcagcctgctcaactccggcggctacaacctgcccatcggccaggccgacgaaatgcagaggtacgtggaggagaaccagaccaggaacaagcaaataatgaggagtatattgccaagtacaatctggcgattagtcgaatgaaagatcttgataagacacaacctttaaaccctattggtt

SEQ ID NO: 1187 - DNA, 506 bp, Artificial
  Mutation introduced by TALE nuclease pair POT32_T03 within a POT32 allele
gcaagcttgtgcaatagtagtagtacatctctcaaaactccttttacttcttcctccacttctttaacttccactcctaagccctctcaacttttcatccatggaaaacgtaaccaaatgttcaaagtttcatgcaaggttaccaataataacggtgaccaaaaccaaaacgttgaaacgaattctgttgatcgaagaaatgttcttcttggcttaggtggtctttatggtgttgctaatgctataccattagctgcatccgctgctccagctccacctcctgatctctcgtcttgtagtatagccaggattaacgaaaatcaggtggtgccgtacagttgttgcgcgcctaagcctgatgatatggagaaagttccgtattacaagttcccttctatgactaagctccgtgttcgtcagcctgctcatgaagaagctaatgaggagtatattgccaagtacaatctggcgattagtcgaatgaaagatcttgataagacacaacc

SEQ ID NO: 1188 - DNA, 552 bp, Artificial
  Mutation introduced by TALE nuclease pair POT32_T03 within a POT32 allele
gcaagcttgtgcaatagtagtagtacatctctcaaaactccttttacttcttcctccacttctttatcttccactcctaagcccctctcaacttttcatccatggaaaacgtaaccaaatgttcaaagtttcatgcaaggttaccaataataacggtgaccaaaaccaaaacgttgaaacgaattctgttgatcgaagaaatgttcttcttggcttaggtggtctttatggtgttgctaatgctataccattagctgcatccgctgctccagctccacctcctgatctctcgtcttgtagtatagccaggattaacgaaaatcaggtggtgccgtacagttgttgcgcgcctaagcctgatgatatggagaaagttccgtattacaagttcccttctatgactaagctccgtgttcgtcagcctgctcatgacgctcagtggaacgaaaactcacgttaagggattttggtcctaatgaggagtatattgccaagtacaatttggcggttagcaagatgaggatcttgataagacacaacctttaaacccta

SEQ ID NO: 1189 - DNA, 622 bp, Artificial
  Mutation introduced by TALE nuclease pair POT32_T03 within a POT32 allele
gcaagcttgtgcaatagtagtagtacatctctcaaaactccttttacttcttcctccacttctttatcttccactcctaagcccctctcaacttttcatccatggaaaacgtaaccaaatgttcaaagtttcatgcaaggttaccaataataacggtgaccaaaaccaaaacgttgaaacgaattctgttgatcgaagaaatgttcttcttggcttaggtggtctttatggtgttgctaatgctataccattagctgcatccgctgctccaactccacctcctgatctctcgtcttgtagtatagccaggattaacgaaaatcaggtggtgccgtacagttgttgcgcgcctaagcctgatgatatggagaaagttccgtattacaagttcccttctatgactaagctccgtgttcgtcagctggaccgtctccagcgcctgcttgccaccgccattgctggcgatggccaccacctgctggggggtcaagccgtgggcctggcacagcaccggcaacagccgctggaccgtctccagcgcctaatgaggagtatattgccaagtacaatctggcgattagtcgaatgagagatcttgataagacacaacctttaaacccta

SEQ ID NO: 1190 - DNA, 590 bp, Artificial
  Mutation introduced by TALE nuclease pair POT32_T03 within a POT32 allele
gcaagcttgtgcaatagtagtagtacatctctcaaaactccttttacttcttcctccacttctttatcttccactcctaagcccctctcaacttttcatccatggaaaacgtaaccaaatgttcaaagtttcatgcaaggttaccaataataacggtgaccaaaaccaaaacgttgaaacaaattctgttgatcgaagaaatgttcttcttggcttaggtggtctttatggtgttgctaatgctataccattagctgcatccgctgctccagctccacctcctgatctctcgtcttgtagtatagccaggattaacgaaaatcaggtggtgccgtacagttgttgcgcgcctaagcctgatgatatggagaaagttccgtattacaagttcccttctatgactaagctccgtgttcgtcagcctgctcatggattaagttgggtaacgccaggggtttttcccagtcacgacgttgtaaaacgacggccagtgaattcgagctcggtacctcgaaaatgaggagtatattgccaagtacaatttggcggttagcaagatgagggatcttgataagacacaacctttaaaa

SEQ ID NO: 1191 - DNA, 526 bp, Artificial
  Mutation introduced by TALE nuclease pair POT32_T03 within a POT32 allele
gcaagcttgtgcaatagtagtagtacatctctcaaaactccttttacttcttcctccacttctttatcttccactcctaagcccctctcaacttttcatccatggaaaacgtaaccaaatgttcaaagtttcatgcaaggttaccaataataacggtgaccaaaaccaaaacgttgaaacaaattctgttgatcgaagaaatgttcttcttggcttaggtggtctttatggtgttgctaatgctataccattagctgcatccgctgctccagctccacctcctgatctctcgtcttgtagtatagccaggattaacgaaaatcaggtggtgccgtacagttgttgcgcgcctaagcctgatgatatggagaaagttccgtattacaagttcccttctatgactaagctccgtgttcgtcagcctgctcagccacgatggcggcaagcaggcgctggagctaatgaggagtatattgccaagtacaatttggcggttagcaagatgagggatcttgataagacacaa

SEQ ID NO: 1192 - DNA, 584 bp, Artificial
  Mutation introduced by TALE nuclease pair POT32_T03 within a POT32 allele
gcaagcttgtgcaatagtagtagtacatctctcaaaactccttttacttcttcctccacttctttatcttccactcctaagcccctctcaacttttcatccatggaaaacgtaaccaaatgttcaaagtttcatgcaaggttatcaataataacggtgaccaaaacgttgaaacgaattctgttgatcgaagaaatgttcttcttggcttaggtggtctttatggtgttgctaatgctataccattagctgcatccgctgctccaactccacctcctgatctctcgtcttgtagtatagccaggattaacgaaaatcaggtggtgccgtacagttgttgcgcgcctaagcctgatgatatggagaaagttccgtattacaagttcccttctatgactaagctccgtgttcgtcagcctgctcacgtttggaactgacggaaccgcaacgttgaaggagccactcagccgcgggtttctggagtttaatgagctaagcacatacgtaatgaggagtatattgccaagtacaatttggcggttagcaagatgagggatcttgataagacacaacctttaaacccta

SEQ ID NO: 1193 - DNA, 595 bp, Artificial
  Mutation introduced by TALE nuclease pair POT32_T03 within a POT32 allele
gcaagcttgtgcaatagtagtagtacatctctcaaaactccttttacttcttcctccacttctttatcttccactcctaagcccctctcaacttttcatccatggaaaacgtaaccaaatgttcaaagtttcatgcaaggttaccaataataacggtgaccaaaaccaaaacgttgaaacaaattctgttgatcgaagaaatgttcttcttggcttaggtggtctttatggtgttgctaatgctataccattagctgcatccgctgctccagctccacctcctgatctctcgtcttgtagtatagccaggattaacgaaaatcaggtggtgccgtacagttgttgcgcgcctaagcctgatgatatggagaaagttccgtattacaagttcccttctatgactaagctccgtgttcgtcagcctgctcatggattaagttggggtaacgccaggggtttttcccagtcacgacgttgtaaaacgacggccagtgaattcgagctcggtacctcgaaaatgaggagtatattgccaagtacaatttggcggttagcaagatgagggatcttgataagacacaacctttaaaaccta

SEQ ID NO: 1194 - DNA, 598 bp, Artificial
  Mutation introduced by TALE nuclease pair POT32_T03 within a POT32 allele
gcaagcttgtgcaatagtagtagtacatctctcaaaactccttttacttcttcctccacttctttaacttccactcctaagccctctcaacttttcatccatggaaaacgtaaccaaatgttcaaagtttcatgcaaggttaccaataataacggtgaccaaaaccaaaacgttgaaacgaattctgttgatcgaagaaatgttcttcttggcttaggtggtctttatggtgttgctaatgctataccattagctgcatccgctgctccagctccacctcctgatctctcgtcttgtagtatagccaggattaacgaaaatcaggtggtgccgtacagttgttgcgcgcctaagcctgatgatatggagaaagttccgtattacaagttcccttctatgactaagctccgtgttcgtcagcctgctcatccctttttcactgcatccagcgcaggacgcccgccgaggcaggccaaggcgacgaggtggtcgttggtcaacgcggccaacgccggatcaaatgaggagtatattgccaagtacaatttggcggttagcaagatgagggatcttgataagacacaacctttaaacccta

SEQ ID NO: 1195 - DNA, 545 bp, Artificial; identical to SEQ ID NO: 983
  Mutation introduced by TALE nuclease pair POT32_T03 within a POT32 allele
  misc_feature (149); (152): n is a or c or t or g

SEQ ID NO: 1196 - DNA, 594 bp, Artificial
  Mutation introduced by TALE nuclease pair POT32_T03 within a POT32 allele
gcaagcttgtgcaatagtagtagtacatctctcaaaactccttttacttcttcctccacttctttatcttccactcctaagcccctctcaacttttcatccatggaaaacgtaaccaaatgttcaaagtttcatgcaaggttaccaataataacggtgaccaaaaccaaaacgttgaaacaaattctgttgatcgaagaaatgttcttcttggcttaggtggtctttatggtgttgctaatgctataccattagctgcatccgctgctccagctccacctcctgatctctcgtcttgtagtatagccaggattaacgaaaatcaggtggtgccgtacagttgttgcgcgcctaagcctgatgatatggagaaagttccgtattacaagttcccttctatgactaagctccgtgttcgtcagcctgctcatggattaagttggggtaacgccagggtttttcccagtcacgacgttgtaaaacgacggccagtgaattcgagctcggtacctcgaaaatgaggagtatattgccaagtacaatttggcggttagcaagatgagggatcttgataagacacaacctttaaaaccta

SEQ ID NO: 1197 - DNA, 622 bp, Artificial
  Mutation introduced by TALE nuclease pair POT32_T03 within a POT32 allele
gcaagcttgtgcaatagtagtagtacatctctcaaaactccttttacttcttcctccacttctttatcttccactcctaagcccctctcaacttttcatccatggaaaacgtaaccaaatgttcaaagtttcatgcaaggttaccaataataacggtgaccaaaaccaaaacgttgaaacgaattctgttgatcgaagaaatgttcttcttggcttaggtggtctttatggtgttgctaatgctataccattagctgcatccgctgctccagctccacctcctgatctctcgtcttgtagtatagccaggattaacgaaaatcaggtggtgccgtacagttgttgcgcgcctaagcctgatgatatggagaaagttccgtattacaagttcccttctatgactaagctccgtgttcgtcagcctgctcatgtcatgatcattggatctagatgcattcgcgaggtaccgagctcgaattcactggccgtcgttttacaacgtcgtgactgggaaaaccctggcgttacccaacttaatcatgaggagtatattgccaagtacaatttggcggttagcaagatgagggatcttgataagacacaacctttaaaccctatggtt

SEQ ID NO: 1198 - DNA, 527 bp, Artificial
  Mutation introduced by TALE nuclease pair POT32_T03 within a POT32 allele
gcaagcttgtgcaatagtagtagtacatctctcaaaactccttttacttcttcctccacttctttatcttccactcctaagcccctctcaacttttcatccatggaaaacgtaaccaaatgttcaaagtttcatgcaaggttaccaataataacggtgaccaaaaccaaaacgttgaaacaaattctgttgatcgaagaaatgttcttcttggcttaggtggtctttatggtgttgctaatgctataccattagctgcatccgctgctccagctccacctcctgatctctcgtcttgtagtatagccaggattaacgaaaatcaggtggtgccgtacagttgttgcgcgcctaagcctgatgatatggagaaagttccgtattacaagttcccttctatgactaagctccgtgttcgtcagcctgctcagccacgatggcggcaagcaggcgctggagctaatgatggagtatattgcaagtacaattgcggttagcaagatgagggatacttgataagacacaacc

SEQ ID NO: 1199 - DNA, 621 bp, Artificial
  Mutation introduced by TALE nuclease pair POT32_T03 within a POT32 allele
gcaagcttgtgcaatagtagtagtacatctctcaaaactccttttacttcttcctccacttctttatcttccactcctaagccctctcaacttttcatccatggaaaacgtaaccaaatgttcaaagtttcatgcaaggttaccaataataacggtgaccaaaaccaaaacgttgaaacgaattctgttgatcgaagaaatgttcttcttggcttaggtggtctttatggtgttgctaatgctataccattagctgcatccgctgctccagctccacctcctgatctctcgtcttgtagtatagccaggattaacgaaaatcaggtggtgccgtacagttgttgcgcgcctaagcctgatgatatggagaaagttccgtattacaagttcccttctatgactaagctccgtgttcgtcagcctgctcatgtcatgatcattggatctagatgcattcgcgaggtaccgagctcgaattcactggccgtcgttttacaacgtcgtgactgggaaaaccctggcgttacccaacttaatcatgaggagtatattgccaagtacaatttggcggttagcaagatgagggatcttgataagacacaacctttaaaccctatggtt

SEQ ID NO: 1200 - DNA, 463 bp, Artificial
  Mutation introduced by TALE nuclease pair POT32_T03 within a POT32 allele
gcaagcttgtgcaatagtagtagtacatctctcaaaactccttttacttcttcctccacttctttatcttccactcctaagccctctcaacttttcatccatggaaaacgtaaccaaatgttcaaagtttcatgcaaggttaccaataataacggtgaccaaaaccaaaacgttgaaacaaaattctgttgatcgaagaaatgttcttcttggcttaggtggtctttatggtgttgctaatgctataccattagctgcatccgctgctccagctccacctcctgatctctcgtcttgtagtatagccaggattaacgaaaatcaggtggtgccgtacagttgttgcgcgcctaagcctgatgatatggagaaagttccgtattacaagttcccttctatgactaagctccgtgttcgtcagcctgctcagccacgatggcggcaagcaggcgctggagctaaa

SEQ ID NO: 1201 - DNA, 507 bp, Artificial
  Mutation introduced by TALE nuclease pair POT32_T03 within a POT32 allele
gcaagcttgtgcaatagtagtagtacatctctcaaaactccttttacttcttcctccacttctttatcttccactcctaagccctctcaacttttcatccatggaaaacgtaaccaaatgttcaaagtttcatgcaaggttaccaataataacggtgaccaaaaccaaaacgttgaaacgaaattctgttgatcgaagaaatgttcttcttggcttaggtggtctttatggtgttgctaatgctataccattagctgcatccgctgctccagctccacctcctgatctctcgtcttgtagtatagccaggattaacgaaaatcaggtggtgccgtacagttgttgcgcgcctaaagcctgatgatatggagaaaggttccgtattacaagttcccttctatgactaatgctccgtgttcgtcagcctgctcacaccgaactgagatacctacagcgtgagcgagtatattgccaagtacaatttggcggttagcaagatgagggatc

SEQ ID NO: 1202 - DNA, 524 bp, Artificial
  Mutation introduced by TALE nuclease pair POT32_T03 within a POT32 allele
gcaagcttgtgcaatagtagtagtacatctctcaaaactccttttacttcttcctccacttctttaacttccactcctaagcccctctcaacttttcatccatggaaaacgtaaccaaatgttcaaagtttcatgcaaggttaccaataataacggtgaccaaaaccaaaacgttgaaacgaattctgttgatcgaagaaatgttcttcttggcttaggtggtctttatggtgttgctaatgctataccattagctgcatccgctgctccagctccacctcctgatctctcgtcttgtagtatagccaggattaacgaaaatcaggtggtgccgtacagttgttgcgcgcctaagcctgatgatatggagaaagttccgtattacaagttcccttctatgactaagctccgtgttcgtcagcctgctcatgaagaagctaatgaggagtatattgccaagtacaatctggcgattagtcgaatgaaagatcttgataagacacaacctttaaaccctattggtt

SEQ ID NO: 1203 - DNA, 610 bp, Artificial
  Mutation introduced by TALE nuclease pair POT32_T03 within a POT32 allele
gcaagcttgtgcaatagtagtagtacatctctcaaaactccttttacttcttcctccacttctttatcttccactcctaagcccctctcaacttttcatccatggaaaacgtaaccaaatgttcaaagtttcatgcaaggttaccaataataacggtgaccaaaaccaaaacgttgaaacaaattctgttgatcgaagaaatgttcttcttggcttaggtggtctttatggtgttgctaatgctataccattagctgcatccgctgctccagctccacctcctgatctctcgtcttgtagtatagccaggattaacgaaaatcaggtggtgccgtacagttgttgcgcgcctaagcctgatgatatggagaaagttccgtattacaagttcccttctatgactaagctccgtgttcgtcagcctgctcattggcggcaagcaggcgctggagacggtccagcggctgttgccggtgctgtgccaggcccacggcttgacccggagcaggtggtggccatcgccagcaagctaatgaggagtatattgccaagtacaatctggcgattagtcgaatgaaagatcttgataagacacaacctttaaacccta

SEQ ID NO: 1204 - DNA, 593 bp, Artificial
  Mutation introduced by TALE nuclease pair POT32_T03 within a POT32 allele
gcaagcttgtgcaatagtagtagtacatctctcaaaactccttttacttcttcctccacttctttatcttccactcctaagcccctctcaacttttcatccatggaaaacgtaaccaaatgttcaaagtttcatgcaaggttatcaataataacggtgaccaaaacgttgaaacgaattctgttgatcgaagaaatgttcttcttggcttaggtggtctttatggtgttgctaatgctataccattagctgcatccgctgctccaactccacctcctgatctctcgtcttgtagtatagccaggattaacgaaaatcaggtggtgccgtacagttgttgcgcgcctaagcctgatgatatggagaaagttccgtattacaagttcccttctatgactaagctccgtgttcgtcagcctgctcatggcgcaatgcactgacgggtgccccgctcaacttgacccccagcaggtggtggccatcgccagcaatggcggtggcaagaagctaatgaggagtatattgccaagtacaatctggcgattagtcgaatgagagatcttgataagacacaacctttaaaccctattggtt

SEQ ID NO: 1205 - DNA, 593 bp, Artificial
  Mutation introduced by TALE nuclease pair POT32_T03 within a POT32 allele
gcaagcttgtgcaatagtagtagtacatctctcaaaactccttttacttcttcctccacttctttatcttccactcctaagcccctctcaacttttcatccatggaaaacgtaaccaaatgttcaaagtttcatgcaaggttaccaataataacggtgaccaaaaccaaaacgttgaaacaaattctgttgatcgaagaaatgttcttcttggcttaggtggtctttatggtgttgctaatgctataccattagctgcatccgctgctccagctccacctcctgatctctcgtcttgtagtatagccaggattaacgaaaatcaggtggtgccgtacagttgttgcgcgcctaagcctgatgatatggagaaagttccgtattacaagttcccttctatgactaagctccgtgttcgtcagcctgctcatggattaagttgggtaacgccagggtttttcccagtcacgacgttgtaaaacgacggccagtgaattcgagctcggtacctcgaaaatgaggagtatattgccaagtacaatttggcggttagcaagatgagggatcttgataagacacaacctttaaaaccta

SEQ ID NO: 1206 - DNA, 536 bp, Artificial
  Mutation introduced by TALE nuclease pair POT32_T03 within a POT32 allele
gcaagcttgtgcaatagtagtagtacatctctcaaaactccttttacttcttcctccacttctttatcttccactcctaagccctctcaacttttcatccatggaaaacgtaaccaaatgttcaaagtttcatgcaaggttaccaataataacggtgaccaaaaccaaaacgttgaaacaaattctgttgatcgaagaaatgttcttcttggcttaggtggtctttatggtgttgctaatgctataccattagctgcatccgctgctccagctccacctcctgatctctcgtcttgtagtatagccaggattaacgaaaatcaggtggtgccgtacagttgttgcgcgcctaagcctgatgatatggagaaagttccgtattacaagttcccttctatgactaagctccgtgttcgtcagcctgctcatgatccccatgttgtgcaaaaagcggttaaagctaatgaggagtatattgccaagtacaatctggcgattagtcgaatgaaagatcttgataagacacaacctttaaa

SEQ ID NO: 1207 - DNA, 624 bp, Artificial
  Mutation introduced by TALE nuclease pair POT32_T03 within a POT32 allele
gcaagcttgtgcaatagtagtagtacatctctcaaaactccttttacttcttcctccacttctttatcttccactcctaagcccctctcaacttttcatccatggaaaacgtaaccaaatgttcaaagtttcatgcaaggttaccaataataacggtgaccaaaaccaaaacgttgaaacgaattctgttgatcgaagaaatgttcttcttggcttaggtggtctttatggtgttgctaatgctataccattagctgcatccgctgctccagctccacctcctgatctctcgtcttgtagtatagccaggattaacgaaaatcaggtggtgccgtacagttgttgcgcgcctaagcctgatgatatggagaaagttccgtattacaagttcccttctatgactaagctccgtgttcgtcagcctgctcatgtcatgatcattggatctagatgcattcgcgaggtaccgagctcgaattcactgggccgtcgtttttacaacgtcgtgactgggaaaaccctggcgttacccaacttaatcatgaggagtatattgccaagtacaatttggcggttagcaagatgagggatcttgataagacacaacctttaaaccctatggtt

SEQ ID NO: 1208 - DNA, 523 bp, Artificial
  Mutation introduced by TALE nuclease pair POT32_T03 within a POT32 allele
gcaagcttgtgcaatagtagtagtacatctctcaaaactccttttacttcttcctccacttctttaacttccactcctaagccctctcaacttttcatccatggaaaacgtaaccaaatgttcaaagtttcatgcaaggttaccaataataacggtgaccaaaaccaaaacgttgaaacgaattctgttgatcgaagaaatgttcttcttggcttaggtggtctttatggtgttgctaatgctataccattagctgcatccgctgctccagctccacctcctgatctctcgtcttgtagtatagccaggattaacgaaaatcaggtggtgccgtacagttgttgcgcgcctaagcctgatgatatggagaaagttccgtattacaagttcccttctatgactaagctccgtgttcgtcagcctgctcatgaagaagctaatgaggagtatattgccaagtacaatctggcgattagtcgaatgaaagatcttgataagacacaacctttaaaccctattggtt

SEQ ID NO: 1209 - DNA, 460 bp, Artificial
  Mutation introduced by TALE nuclease pair POT32_T03 within a POT32 allele
gcaagcttgtgcaatagttgtagtacatctctcaaaactccttttacttcttcctccacttctttatcttccactcctaagcccctctcaacttttcatccatggaaaacgtaaccaaatgttcaaagtttcatgcaaggttaccaataataacggtgaccaaaaccaaaacgttgaaacgaattctgttgatcgaagaaatgttcttcttggcttaggtggtctttatggtgttgctaatgctataccattagctgcatccgctgctccagctccacctcctgatctctcgtcttgtagtatagccaggattaacgaaaatcaggtggtgccgtacagttgttgcgcgcctaagcctgatgatatggagaaagttccgtattacaagttcccttctatgactaagctccgtgttcgtcagcctgctcatgatcccagaatttggcggttagcaagatga

SEQ ID NO: 1210 - DNA, 571 bp, Artificial
  Mutation introduced by TALE nuclease pair POT32_T03 within a POT32 allele
gcaagcttgtgcaatagtagtagtacatctctcaaaactccttttacttcttcctccacttctttatcttccactcctaagcccctctcaacttttcatccatggaaaacgtaaccaaatgttcaaagtttcatgcaaggttaccaataataacggtgaccaaaaccaaaacgttgaaacaaattctgttgatcgaagaaatgttcttcttggcttaggtggtctttatggtgttgctaatgctataccattagctgcatccgctactccagctccacctcctgatctctcatcttgtagtaaagcaaagattaatgaaactacggaggtgccatacagttgttgcgctcccacgccaaaagatatgaagaaagttccatattacaaagttcccttctatgactaagctccgtattcgtccccaaatatagcgcgcaaactaggataaattatcgcgcgcggtgtcatctatgttactagatcgggaatgaggagtatattgccaagtacaatttggcggttagcaagatgagggatcttgataagacacaacctttaaaccctattggtt

SEQ ID NO: 1211 - DNA, 524 bp, Artificial
  Mutation introduced by TALE nuclease pair POT32_T03 within a POT32 allele
gcaagcttgtgcaatagtagtagtacatctctcaaaactccttttacttcttcctccacttctttatcttccactcctaagccctctcaacttttcatccatggaaaacgtaaccaaatgttcaaagtttcatgcaaggttaccaataataacggtgaccaaaaccaaaacgttgaaacaaattctgttgatcgaagaaatgttcttcttggcttaggtggtctttatggtgttgctaatgctataccattagctgcatccgctgctccagctccacctcctgatctctcgtcttgtagtatagccaggattaacgaaaatcaggtggtgccgtacagttgttgcgcgcctaagcctgatgatatggagaaagttccgtattacaagttcccttctatgactaagctccgtgttcgtcagcctgctcagccacgatggcggcaagcaggcgctggagctaatgaggagtatattgccaagtacaaatttggcggttagcaagatgagggatcttgataagacac

SEQ ID NO: 1212 - DNA, 548 bp, Artificial
  Mutation introduced by TALE nuclease pair POT32_T03 within a POT32 allele
gcaagcttgtgcaatagtagtagtacatctctcaaaactccttttacttcttcctccacttctttatcttccactcctaagccctctcaacttttcatccatggaaaacgtaaccaaatgttcaaagtttcatgcaaggttaccaataataacggtgaccaaaaccaaaacgttgaaacaaattctgttgatcgaagaaatgttcttcttggcttaggtggtctttatggtgttgctaatgctataccattagctgcatccgctgctccagctccacctcctgatctctcgtcttgtagtatagccaggattaacgaaaatcaggtggtgccgtacagttgttgcgcgcctaagcctgatgatatggagaaagttccgtattacaagttcccttctatgactaagctccgtgttcgtcagcctgctcatgagatcttcttgagatcctttttttctgcgcgtaagctaatgaggagtatattgccaagtacaatctggcgattagtcgaatgaaagatcttgataagacacaacctttaaaccctatt

SEQ ID NO: 1213 - DNA, 582 bp, Artificial
  Mutation introduced by TALE nuclease pair POT32_T03 within a POT32 allele
gcaagcttgtgcaatagtgtagtacatctctcaaaactccttttacttcttcctccacttctttatcttccactcctaagccctctcaacttttcatccatggaaaacgtaaccaaatgttcaaagtttcatgcaaggttaccaataataacggtgaccaaaaccaaaacgttgaaacaaattctgttgatcgaagaaatgttcttcttggcttaggtggtctttatggtgttgctaatgctataccattagctgcatccgctgctccagctccacctcctgatctctcgtcttgtagtatagccaggattaacgaaaatcaggtggtgccgtacagttgttgcgcgcctaagcctgatgatatggagaaagttccgtattacaagttcccttctatgactaagctccgtgttcgtcagcctgctcatgaaaacgttcttcggggcgaaaactctcaaaggatctccgatgacgcgggacaagccgttttacgtttggaactgaacagaaaccgctaaatgaggagtatattgccaaagtacaatctggcgattagtcgaatgaaagatcttgataagacac

SEQ ID NO: 1214 - DNA, 586 bp, Artificial
  Mutation introduced by TALE nuclease pair POT32_T03 within a POT32 allele
gcaagcttgtgcaatagtagtagtacatctctcaaaactccttttacttcttcctccacttctttatcttccactcctaagcccctctcaacttttcatccatggaaaacgtaaccaaatgttcaaagtttcatgcaaggttaccaataataacggtgaccaaaaccaaaacgttgaaacaaattctgttgatcgaagaaatgttcttcttggcttaggtggtctttatggtgttgctaatgctataccattagctgcatccgctgctccagctccacctcctgatctctcgtcttgtagtatagccaggattaacgaaaatcaggtggtgccgtacagttgttgcgcgcctaagcctgatgatatggagaaagttccgtattacaagttcccttctatgactaagctccgtgttcgtcagcctgctcatggattaagttggggtaacgccaggggttttcccagtcacgacgttgtaaaacgacggccagtgaattcgagctcggtacctcgaaaatgaggagtatattgccaagtacaatttggcggttagcaagatgagggatcttgataagacacaaccttt

SEQ ID NO: 1215 - DNA, 538 bp, Artificial
  Mutation introduced by TALE nuclease pair POT32_T03 within a POT32 allele
gcaagcttgtgcaatagtagtagtaccactctcaaaactccttttacttcttcctccacttctttatcttccactcctaagcccctctcaacttttcctccatggaaaacgtaacaaaacgttcaaagtttcatgcaaggttaccaataataacggtgaccaaaacgttgaaacgaattctgttgatcgaagaaatgttcttcttggcttaggtggtctttatggtgttgctaatgctataccattagctgcatccgctactccagctccacctcctgatctctcatcttgtagtaaagcaaagattaatgaaactacggaggtgccatacagttgttgcgctcccacgcctaaagatatgaagaaagttccatattacaagttcccttctatgactaagctccgtattcgtcccctgctcatggtcgttcggctgcggcgagcggtatcagctcactcaatgaggagtatattgccaagtacaatctggcgattagtcgaatgaaagatcttgataagacacaacctttaaacccta

SEQ ID NO: 1216 - DNA, 603 bp, Artificial
  Mutation introduced by TALE nuclease pair POT32_T03 within a POT32 allele
gcaagcttgtgcaatagtagtagtacatccctcaacatccttttacttcttcctccacttctttaacttccactcctaaaccctctcaacttttcatccatggaaaacgtaaccaaatgttcaaagtttcaattgcatggttaccaatcaataaacggtggacccaaaaaccaaaacgttgaaacgaattctgttgatcgaagaaatgttcttcttggcttaggtggtctttatggtgttgctaatgctataccattagctgcatccgctactccatctccacctcctgatctctcgtcttgtagtatagccaggattaacgaaactcatgtggtgccgtacagttgttgcgcgcctaagcctgatgatatggagaaagttccgtattacaagttcccttctatgactaagctccgtgttcgtcagcctgctcaactccggcggctacaacctgcccatcggccaggccgacgaaatgcagaggtacgtggaggagaaccagaccaggaacaagcaaataatgaggagtatattgccaagtacaatctggcgattagtcgaatgaaagatcttgataagacacaaccttaaaccctattggtt

SEQ ID NO: 1217 - DNA, 591 bp, Artificial
  Mutation introduced by TALE nuclease pair POT32_T03 within a POT32 allele
gcaagcttgtgcaatagtagtagtacatctctcaaaactccttttacttcttcctccacttctttatcttccactcctaagccctctcaacttttcatccatggaaaacgtaaccaaatgttcaaagtttcatgcaaggttaccaataataacggtgaccaaaaccaaaacgttgaaacaaattctgttgatcgaagaaatgttcttcttggcttaggtggtctttatggtgttgctaatgctataccattagctgcatccgctgctccagctccacctcctgatctctcgtcttgtagtatagccaggattaacgaaaatcaggtggtgccgtacagttgttgcgcgcctaagcctgatgatatggagaaagttccgtattacaagttcccttctatgactaagctccgtgttcgtcagcctgctcatggattaagttggggtaacgccaggggtttttcccagtcacgacgttgtaaaacgacggccagtgaattcgagctcggtacctcgaaatgaggagtatattgcaagtacaattggcggttagcaagatgagggatcttgataagacacaacctttaaaaccta

SEQ ID NO: 1218 - DNA, 514 bp, Artificial
  Mutation introduced by TALE nuclease pair POT32_T03 within a POT32 allele
gcaagcttgtgcaatagtagtagtacatctctcaaaactccttttacttcttcctccacttctttatcttccactcctaagccctctcaacttttcatccatggaaaacgtaaccaaatgttcaaagtttcatgcaaggttaccaataataacggtgaccaaaaccaaaacgttgaaacaaattctgttgatcgaagaaatgttcttcttggcttaggtggtctttatggtgttgctaatgctataccattagctgcatccgctgctccagctccacctcctgatctctcgtcttgtagtatagccaggattaacgaaaatcaggtggtgccgtacagttgttgcgcgcctaagcctgatgatatggagaaagttccgtattacaagttcccttctatgactaagctccgtgttcgtcagcctgctcagccacgatggcggcaagcaggcgctggagctaatgaggagtatattgccaagtacaatttggcggttagcaagatgagggatcttg

SEQ ID NO: 1219 - DNA, 583 bp, Artificial
  Mutation introduced by TALE nuclease pair POT32_T03 within a POT32 allele
gcaagcttgtgcaatagtagtagtacatctctcaaaactccttttacttcttcctccacttctttatcttccactcctaagccctctcaacttttcatccatggaaaacgtaaccaaatgttcaaagtttcatgcaaggttaccaataataacggtgaccaaaaccaaaacgttgaaacaaattctgttgatcgaagaaatgttcttcttggcttaggtggtctttatggtgttgctaatgctataccattagctgcatccgctgctccagctccacctcctgatctctcgtcttgtagtatagccaggattaacgaaaatcaggtggtgccgtacagttgttgcgcgcctaagcctgatgatatggagaaagttccgtattacaagttcccttctatgactaagctccgtgttcgtcagcctgctcatggattaagttggggtaacgccagggtttttcccagtcacgacgttgtaaaacgacggccagtgaattcgagctcggtacctcgaaatgaggagtatattgcaagtacaatttggcggttagcaagatgagggatcttgataagacacaaccttt

SEQ ID NO: 1220 - DNA, 595 bp, Artificial
  Mutation introduced by TALE nuclease pair POT32_T03 within a POT32 allele
  misc_feature (470): n is a or c or t or g
gcaagcttgtgcaatagtagtagtacatctctcaaaactccttttacttcttcctccacttctttatcttccactcctaagcccctctcaacttttcatccatggaaaacgtaaccaaatgttcaaagtttcatgcaaggttaccaataataacggtgaccaaaaccaaaacgttgaaacaaattctgttgatcgaagaaatgttcttcttggcttaggtggtctttatggtgttgctaatgctataccattagctgcatccgctgctccagctccacctcctgatctctcgtcttgtagtatagccaggattaacgaaaatcaggtggtgccgtacagttgttgcgcgcctaagcctgatgatatggagaaagttccgtattacaagttcccttctatgactaagctccgtgttcgtcagcctgctcatggattaagttggggtaacgccaggggtttttccccagtcncgacgttgtaaaacgacggccagtgaattcgagctcgggtacctcgaaaatgaggagtatattgccaagtacaatttggcggttagcaagatgagggatcttgataagacacaacctttaaaacc

SEQ ID NO: 1221 - DNA, 543 bp, Artificial
  Mutation introduced by TALE nuclease pair POT32_T03 within a POT32 allele
gcaagcttgtgcaatagttgtagtacatccctcaaaacatccttttacttcttcctccacttctttaacttccactcctaaaccctctcaacttttcatccatggaaaacgtaaccaaatgttcaaagtttcatgcatggttaccaataataacggtgaccaaaaccaaacgttgaaacgaattctgttgatcgaagaaatgttcttcttggcttaggtggtctttatggtgttgctaatgctataccattagctgcatccgctactccatctccacctcctgatctctcatcttgtagtaaagcaaagattaatgaaactacggaggtgccatacagttgttgcgctcccacgcctaaagatatgaagaaagttccatattacaagttcccttctatgactaagctccgtattcgtcccctgctcatggtcgttcggctgcggcgagcggtatcagctcactcaatgaggagtatattgccaagtacaatctggcgattagtcgaatgaaagatcttgataagacacaacctttaaacccta

SEQ ID NO: 1222 - DNA, 523 bp, Artificial; identical to SEQ ID NO: 1137
  Mutation introduced by TALE nuclease pair POT32_T03 within a POT32 allele

SEQ ID NO: 1223 - DNA, 524 bp, Artificial
  Mutation introduced by TALE nuclease pair POT32_T03 within a POT32 allele
  misc_feature (479): n is a or c or t or g
gcaagcttgtgcaatagtagtagtacatctctcaaaactccttttacttcttcctccacttctttatcttccactcctaagcccctctcaacttttcatccatggaaaacgtaaccaaatgttcaaagtttcatgcaaggttaccaataataacggtgaccaaaaccaaaacgttgaaacaaaattctgttgatcgaagaaatgttcttcttggcttaggtggtctttatggtgttgctaatgctataccattagctgcatccgctgctccagctccacctcctgatctctcgtcttgtagtatagccaggattaacgaaaatcaggtggtgccgtacagttgttgcgcgcctaagcctgatgatatggagaaagttccgtattacaagttcccttctatgactaagctccgtgttcgtcagcctgctcatgggattaagtttggggttaaaccgcccagggggtttttccccaagtcncgacgttgtaaaatccgacggccagtgaattcgagctcgggtacc

SEQ ID NO: 1224 - DNA, 528 bp, Artificial
  Mutation introduced by TALE nuclease pair POT32_T03 within a POT32 allele
gcaagcttgtgcaatagtagtagtacatctctcaaaactccttttacttcttcctccacttctttaacttccactcctaagcccctctcaacttttcatccatggaaaacgtaaccaaatgttcaaagtttcatgcaaggttaccaataataacggtgaccaaaaccaaaacgttgaaacgaattctgttgatcgaagaaatgttcttcttggcttaggtggtctttatggtgttgctaatgctataccattagctgcatccgctgctccagctccacctcctgatctctcgtcttgtagtatagccaggattaacgaaaatcaggtggtgccgtacagttgttgcgcgcctaagcctgatgatatggagaaagttccgtattacaagttcccttctatgactaagctccgtgttcgtcagcctgctcatgaagcccccccctaatgaggagtatattgccaagtacaatctggcgattagtcgaatgaaagatcttgataagacacaacctttaaaccctattggtt

SEQ ID NO: 1225 - DNA, 526 bp, Artificial
  Mutation introduced by TALE nuclease pair POT32_T03 within a POT32 allele
gcaagcttgtgcaatagtagtagtacatctctcaaaactccttttacttcttcctccacttctttatcttccactcctaagccctctcaacttttcatccatggaaaacgtaaccaaatgttcaaagtttcatgcaaggttaccaataataacggtgaccaaaaccaaaacgttgaaacaaattctgttgatcgaagaaatgttcttcttggcttaggtggtctttatggtgttgctaatgctataccattagctgcatccgctgctccagctccacctcctgatctctcgtcttgtagtatagccaggattaacgaaaatcaggtggtgccgtacagttgttgcgcgcctaagcctgatgatatggagaaagttccgtattacaagttcccttctatgactaagctccgtgttcgtcagcctgctcagccacgatggcggcaagcaggcgctggagctaatgaggagtatattgccaagtacaattttggcggttagcaagatgagggatcttgataagacacaa

SEQ ID NO: 1226 - DNA, 596 bp, Artificial
  Mutation introduced by TALE nuclease pair POT32_T03 within a POT32 allele
gcaagcttgtgcaatagtagtagtacatctctcaaaactccttttacttcttcctccacttctttatcttccactcctaagcccctctcaacttttcatccatggaaaacgtaaccaaatgttcaaagtttcatgcaaggttaccaataataacggtgaccaaaaccaaaacgttgaaacaaattctgttgatcgaagaaatgttcttcttggcttaggtggtctttatggtgttgctaatgctataccattagctgcatccgctgctccagctccacctcctgatctctcgtcttgtagtatagccaggattaacgaaaatcaggtggtgccgtacagttgttgcgcgcctaagcctgatgatatggagaaagttccgtattacaagttcccttctatgactaagctccgtgttcgtcagcctgctcatggattaagttggggtaacgccaggggtttttccccagtcacgacgttgtaaaacgacggccagtgaattcgagctcggtacctcgaaaatgaggagtatattgccaagtacaatttggcggttagcaagatgagggatcttgataagacacaacctttaaaaccta

SEQ ID NO: 1227 - DNA, 626 bp, Artificial
  Mutation introduced by TALE nuclease pair POT32_T03 within a POT32 allele
  misc_feature (449); (527): n is a or c or t or g
gcaagcttgtgcaatagtagtagtacatctctcaaaactccttttacttcttcctccacttctttatcttccactcctaagcccctctcaacttttcatccatggaaaacgtaaccaaatgttcaaagtttcatgcaaggttaccaataataacggtgaccaaaaccaaaacgttgaaacgaattctgttgatcgaagaaatgttcttcttggcttaggtggtctttatggtgttgctaatgctataccattagctgcatccgctgctccagctccacctcctgatctctcgtcttgtagtatagccaggattaacgaaaatcaggtggtgccgtacagttgttgcgcgcctaagcctgatgatatggagaaagttccgtattacaagttcccttctatgactaagctccgtgttcgtcagcctgctcatgtcatgatcattgggatcnagatgcttcgccgaggtaccgagctcgaattcactgggcccgtcgtttttacaacgtcgtgactgggaaaaccctggngttacccaacttaatcatgaggagtatattgccaagtacaatttggcggttagcaagatgagggatcttgataagacacaacctttaaaccctatggtt

SEQ ID NO: 1228 - DNA, 592 bp, Artificial
  Mutation introduced by TALE nuclease pair POT32_T03 within a POT32 allele
gcaagcttgtgcaatagtagtagtacatctctcaaaactccttttacttcttcctccacttctttatcttccactcctaagccctctcaacttttcatccatggaaaacgtaaccaaatgttcaaagtttcatgcaaggttaccaataataacggtgaccaaaaccaaaacgttgaaacaaattctgttgatcgaagaaatgttcttcttggcttaggtggtctttatggtgttgctaatgctataccattagctgcatccgctgctccagctccacctcctgatctctcgtcttgtagtatagccaggattaacgaaaatcaggtggtgccgtacagttgttgcgcgcctaagcctgatgatatggagaaagttccgtattacaagttcccttctatgactaagctccgtgttcgtcagcctgctcatggattaagttggggtaacgccagggtttttcccagtcacgacgttgtaaaacgacggccagtgaattcgagctcggtacctcgaaaatgaggagtatattgcaagtacaatttggcggttagcaagatgagggatcttgataagacacaacctttaaaaccta

SEQ ID NO: 1229 - DNA, 510 bp, Artificial
  Mutation introduced by TALE nuclease pair POT33_T01 within a POT33 allele
caagtgtgtgcaatagtagttctactactacaactctcaaaactcctttcatttcatccaatacttctttaggttccactcctaagcttttcctccatggaaaacgtaacaaaactttcaaagtctcttgcaaagtttctaatagtggtgaccaaaaccaaaacattgaaacgaattctgttgatcgaagaaatgttcttcttggcttaggaggtctttatggtgttgctaatgctataccattagcagcatcggctactcctataccatcccctgatctcaaaacttgtggtagagccaccatatcggatggtccactagtaccctatacttgttgccccctcctatgccaactaactttgacaccattccatattacaagttcccttctatgactaaactccgtatccgtcccctgctcatgctgttgatgaggagtatattgctaagtataatttggccataagtcgaatgaaagatcttgataagacagaccctttaaaccctctt

SEQ ID NO: 1230 - DNA, 514 bp, Artificial
  Mutation introduced by TALE nuclease pair POT33_T01 within a POT33 allele
caagtgtgtgcaatagtagttctactactacaactctcaaaactcctttcatttcatccaatacttctttaggttccactcctaagccttttcctccatggaaaacgtaacaaaactttcaaagtctcttgcaaagtttctaatagtggtgaccaaaaccaaaacattgaaacgaattctgttgatcgaagaaatgttcttcttggcttaggaggtctttatggtgttgctaatgctataccattagcagcatcgactactcctataccatcccctgatctcaaaacttgtggtagagccaccatatcggatggtccactagtaccctatacttgttgccccctcctatgccaactaactttgacaccattccatattacaagttcccttctcatgactaaactccgtcatccgtccccctgctcatgctgttgatgaggagtatattgctaagtataatttggccataagtcgaatgaaagatcttgataagacagaccctttaaaccctctt

SEQ ID NO: 1231 - DNA, 515 bp, Artificial
  Mutation introduced by TALE nuclease pair POT33_T01 within a POT33 allele
caagtgtgtgcaatagtagttctactactacaactctcaaaactcctttcatttcatccaatacttctttaggttccactcctaagccctctttcctccatggaaaacgtaacaaaactttcaaagtctcttgcaaagtttctaatagtggtgaccaaaaccaaaacattgaaacgaattctgttgatcgaagaaatgttcttcttggcttaggaggtctttatggtgttgctaatgctataccattagcagcatcggctactcctataccatcccctgatctcaaaacttgtggtagagccaccatatcggatggtccactagtaccctatacttgttgcccccctcctatgccaactaactttgacaccattccatattacaagttcccttctatgactaaactccgtatccgtccccctgctcatgctgttgatgaggagtatattgctaagtataatttggccataagtcgaatgaaagatcttgataagacagaccctttaaaccctctt

SEQ ID NO: 1232 - DNA, 517 bp, Artificial
  Mutation introduced by TALE nuclease pair POT33_T01 within a POT33 allele
caagtgtgtgcaatagtagttctactactacaactctcaaaactcctttcatttcatccaatacttctttaggttccactcctaagccctcttttcctccatggaaaacagtaacaaactttcaaagtctcttgcaaagtttctaatagttggtgaccaaaaccaaaacattgaaacgaattctgttgatcgaagaaatgttcttcttggcttaggaggtctttatggtgttgctaatgctataccatttagcagcatcggctactcctataccatccccctgatctcaaaacttgtggtagagccaccatatcggatggtccactagtaccctatacttgttgccccctcctatgccaactaactttgacaccattccatattacaagttcccttctatgactaaactccgtatccgtcccctgctcatgctgttgatgaggagtatattgctaagtataatttggccataagtcgaatgaaagatcttgataagacagaccctttaaaccctctt

SEQ ID NO: 1233 - DNA, 516 bp, Artificial
  Mutation introduced by TALE nuclease pair POT33_T01 within a POT33 allele
caagtgtgtgcaatagtagttctactactacaactctcaaaactcctttcatttcatccaatacttctttaggttccactcctaagcccttcctccatcggaaaacgtaacaaaacttactaaagtctcttgcaaaagttttctaatagtggtgaccaaaaccaaaacattgaaacgaattctgttgatcgaagaaatgttcttcttggcttaggaggtctttatggtgttgctaatgctataccattagcagcatcggctactcctataccatcccctgatctcaaaacttgtggtagagccaccatatcggatggtccactagtaccctatacttgttgcccccctcctatgccaactaactttgacaccattccatattacaagttcccttctatgactaaactccgtatccgtcccctgctcatgctgttgatgaggagtatacttgctaagtataatttggccataagtcgaatgaaagatcttgataagacagaccctttaaaccctctt

SEQ ID NO: 1234 - DNA, 509 bp, Artificial
  Mutation introduced by TALE nuclease pair POT33_T01 within a POT33 allele
caagtgtgtgcaatagtagttctactactacaactctcaaaactcctttcatttcatccaatacttctttaggttccactcctaagccctctccatggaaaacgtaacaaaacttcaaagtctcttgcaaaagtttctaatagtggtgaccaaaaccaaaacattgaaacgaattctgttgatcgaagaaatgttcttcttggcttaggaggtctttatggtgttgctaatgctataccattagcagcatcggctactcctataccatcccctgatctcaaaacttgtggtagagccaccatatcggatggtccactagtaccctatacttgttgcccccctcctatgccaactaactttgacaccattccatattacaagttcccttctatgactaaactccgtatccgtcccctgctcatgctgttgatgaggagtatattgctaagtataatttggccataagtcgaatgaaagatcttgataagacagaccctttaaaccctctt

SEQ ID NO: 1235 - DNA, 516 bp, Artificial
  Mutation introduced by TALE nuclease pair POT33_T01 within a POT33 allele
caagtgtgtgcaatagtagttctactactacaactctcaaaactcctttcatttcatccaatacttctttaggttccactcctaagccctcttttcctccatggaaaacgtaacaaaactttcaaagtctcttgcaaagtttctaatagtggtgaccaaaaccaaaacattgaaacgaattctgttgatcgaagaaatgttcttcttggcttaggaggtctttatggtgttgctaatgctataccattagcagcatcggctactcctataccatcccctgatctcaaaacttgtggtagagccaccatatcggatggtccactagtaccctatacttgttgcccccctcctatgccaactaactttgacaccattccatattacaagttcccttctatgactaaactccgtatccgtccccctgctcatgctgttgatgaggagtatattgctaagtataatttggccataagtcgaatgaaagatcttgataagacagaccctttaaaccctctt

SEQ ID NO: 1236 - DNA, 517 bp, Artificial
  Mutation introduced by TALE nuclease pair POT33_T01 within a POT33 allele
caagtgtgtgcaatagtagttctactactacaactctcaaaactcctttcatttcatccaatacttctttaggttccactcctaagccctcttttcctccatggaaaacgtaacaaaactttcaaagtctcttgcaaagtttctaatagtggtgaccaaaaccaaaacattgaaacgaattctgttgatcgaagaaatgttcttcttggcttaggaggtctttatggtgttgctaatgctataccattagcagcatcggctactcctataccatcccctgatctcaaaacttgtggtagagccaccatatcggatggtccactagtaccctatacttgttgcccccctcctatgccaactaactttgacaccattccatattacaagttcccttctatgactaaactccgtatccgtccccctgctcatgctgttgatgagggagtatattgctaagtataatttggccataagtcgaatgaaagatcttgataagacagaccctttaaaccctctt

SEQ ID NO: 1237 - DNA, 508 bp, Artificial
  Mutation introduced by TALE nuclease pair POT33_T01 within a POT33 allele
caagtgtgtgcaatagtagttctactactacaactctcaaaactcctttcatttcatccaatacttctttaggttccactcctaagccctcttcctcgaatgaaacaagactaactaaagtccttgcaaagtttctaatagtggtgaccaaaaccaaaacattgaaacgaattctgttgatcgaagaaatgttcttcttggcttaggaggtctttatggtgttgctaatgctataccattagcagcatcggctactcctataccatcccctgatctcaaaacttgtggtagagccaccatatcggatggtccactagtaccctatacttgttgcccccctcctatgccaactaactttgacaccattccatattacaagttcccttctatgactaaactccgtatccgtccccctgctcatgctgttgatgaggagtatattgctaagtataatttggccataagtcgaatgaaagatcttgataagacagaccctttaaaccctctt

SEQ ID NO: 1238 - DNA, 511 bp, Artificial
  Mutation introduced by TALE nuclease pair POT33_T01 within a POT33 allele
caagtgtgtgcaatagtagttctactactacaactctcaaaactcctttcatttcatccaatacttctttaggttccactcctaagccttttcctccatggaaaacgtaacaaaactttcaaagtctcttgcaaagtttctaatagtggtgaccaaaaccaaaacattgaaacgaattctgttgatcgaagaaatgttcttcttggcttaggaggtctttatggtgttgctaatgctataccattagcagcatcggctactcctataccatcccctgatctcaaaacttgtggtagagccaccatatcggatggtccactagtaccctatacttgttgccccctcctatgccaactaactttgacaccattccatattacaagttcccttctatgactaaactccgtatccgtcccctgctcatgctgttgatgaggagtatattgctaagtataatttggccataagtcgaatgaaagatcttgataagacagaccctttaaaccctctt

SEQ ID NO: 1239 - DNA, 511 bp, Artificial
  Mutation introduced by TALE nuclease pair POT33_T01 within a POT33 allele
caagtgtgtgcaatagtagttctactactacaactctcaaaactcctttcatttcatccaatacttctttaggttccactcctaagccctcctccatggaaaacgtaacaaaactttcaaagtctcttgcaaagtttctaatagtggtgaccaaaaccaaaacattgaaacgaattctgttgatcgaagaaatgttcttcttggcttaggaggtctttatggtgttgctaatgctataccattagcagcatcggctactcctataccatcccctgatctcaaaacttgtggtagagccaccatatcggatggtccactagtaccctatacttgttgcccccctcctatgccaactaactttgacaccattccatattacaagttcccttctatgactaaactccgtatccgtccccctgctcatgctgttgatgaggagtatattgctaagtataatttggccataagtcgaatgaaagatcttgataagacagaccctttaaaccctctt

SEQ ID NO: 1240 - DNA, 514 bp, Artificial
  Mutation introduced by TALE nuclease pair POT33_T01 within a POT33 allele
caagtgtgtgcaatagtagttctactactacaactctcaaaactcctttcatttcatccaatacttctttaggttccactcctaagccctctttcctccatggaaaacgtaacaaaactttcaaagtctcttgcaaagtttctaatagtggtgaccaaaaccaaaacattgaaacgaattctgttgatcgaagaaatgttcttcttggcttaggaggtctttatggtgttgctaatgctataccattagcagcatcggctactcctataccatccccctgatctcaaaacttgtggtagagccaccatatcggatggtccactagtaccctatacttgttgcccccctcctatgccaactaactttgacaccattccatattacaagttcccttctatgactaaactccgtatccgtcccctgctcatgctgttgatgaggatatattgctaagtataatttggccataagtcgaatgaaagatcttgataagacagaccctttaaaccctctt

SEQ ID NO: 1241 - DNA, 514 bp, Artificial
  Mutation introduced by TALE nuclease pair POT33_T01 within a POT33 allele
caagtgtgtgcaatagtagttctactactacaactctcaaaactcctttcatttcatccaatacttctttaggttccactcctaagccctctttcctccatggaaaacgtaacaaaactttcaaagtctcttgcaaagtttctaatagtggtgaccaaaaccaaaacattgaaacgaattctgttgatcgaagaaatgttcttcttggcttaggaggtctttatggtgttgctaatgctataccattagcagcatcggctactcctataccatcccctgatctcaaaacttgtggtagagccaccatatcggatggtccactagtaccctatacttgttgcccccctcctatgccaactaactttgacaccattccatattacaagttcccttctatgactaaactccgtatccgtcccctgctcatgctgttgatgaggagtatattgctaagtataatttggccataagtcgaatgaaagatcttgataagacagaccctttaaaccctctt

SEQ ID NO: 1242 - DNA, 517 bp, Artificial
  Mutation introduced by TALE nuclease pair POT33_T01 within a POT33 allele
caagtgtgtgcaatagtagttctactactacaactctcaaaactcctttcatttcatccaatacttctttaggttccactcctaagcccttttcctccatggaaaacgtaacaaaactttcaaagtctcttgcaaagtttctaatagtggtgaccaaaaccaaaacattgaaacgaattctgttgatcgaagaaatgttcttcttggcttaggaggtctttatggtgttgctaatgctataccattagcagcatcggctactcctataccatcccctgatctcaaaacttgtggtagagccaccatatcggatggtccactagtaccctatacttgttgccccctcctatgccaactaactttgacaccattccatattacaagttcccttctatgactaaactaccgtcatccgtccccgtccgctcatgctgttgatgaggagtatattgctaagtataatttggccataagtcgaatgaaagatcttgataagacagaccctttaaaccctctt

SEQ ID NO: 1243 - DNA, 515 bp, Artificial
  Mutation introduced by TALE nuclease pair POT33_T01 within a POT33 allele
caagtgtgtgcaatagtagttctactactacaactctcaaaactcctttcattcatccaatcaacttctttatggttccatctcctaagcccttttcctccatggaaaacgtaacaaaactttcaaagtctcttgcaaagtttctaatagtggtgaccaaaaccaaaacattgaaacgaattctgttgatcgaagaaatgttcttcttggcttaggaggtctttatggtgttgctaatgctataccattagcagcatcggctactcctataccatcccctgatctcaaaacttgtggtagagccaccatatcggatggtccactagtaccctatacttgttgccccctcctatgccaactaactttgacaccattccatattacaagttcccttctatgactaaactccgtatccgtcccctgctcatgctgttgatgaggagtatattgctaagtataatttggccataagtcgaatgaaagatcttgataagacagaccctttaaaccctctt

SEQ ID NO: 1244 - DNA, 514 bp, Artificial
  Mutation introduced by TALE nuclease pair POT33_T01 within a POT33 allele
caagtgtgtgcaatagtagttctactactacaactctcaaaactcctttcatttcatccaatacttctttaggttccactcctaagccctctttcctccatggaaaacgtaacaaaactttcaagtctcttgcaaagtttctaatagtggtgaccaaaaccaaaacattgaaacgaattctgttgatcgaagaaatgttcttcttggcttaggaggtctttatggtgttgctaatgctataccattagcagcatcggctactcctataccatccccctgatctcaaaacttgtggtagagccaccatatcggatggtccactagtaccctatacttgttgcccccctcctatgccaactaactttgacaccattccatattacaagttcccttctatgactaaactccgtatccgtcccctgctcatgctgttgatgaggagtatattgctaagtataatttggccataagtcgaatgaaagatcttgataagacagaccctttaaaccctctt

SEQ ID NO: 1245 - DNA, 513 bp, Artificial
  Mutation introduced by TALE nuclease pair POT33_T01 within a POT33 allele
caagtgtgtgcaatagtagttctactactacaactctcaaaactcctttcatttcatccaatacttctttaggttccactcctaagccctctttcctccatggaaaacgtaacaaaactttcaaagtctcttgcaaagtttctaatagtggtgaccaaaaccaaaacattgaaacgaattctgttgatcgaagaaatgttcttcttggcttaggaggtctttatggtgttgctaatgctataccattagcagcatcggctactcctataccatcccctgatctcaaaacttgtggtagagccaccatatcggatggtccactagtaccctatacttgttgccccctcctatgccaactaactttgacaccattccatattacaagttcccttctatgactaaactccgtatccgtcccctgctcatgctgttgatgaggagtatattgctaagtataatttggccataagtcgaatgaaagatcttgataagacagaccctttaaaccctctt

SEQ ID NO: 1246 - DNA, 512 bp, Artificial
  Mutation introduced by TALE nuclease pair POT33_T01 within a POT33 allele
caagtgtgtgcaataggtagttctactactacaactctcaaaactcctttcatttcatccaatacttctttaggttccactcctaagccttcctccatggaaaacgtaacaaaactttcaaagtctcttgcaaagtttctaatagtggtgaccaaaaccaaaacattgaaacgaattctgttgatcgaagaaatgttcttcttggcttaggaggtctttatggtgttgctaatgctataccattagcagcatcggctactcctataccatcccctgatctcaaaacttgtggtagagccaccatatcggatggtccactagtaccctatacttgttgcccccctcctatgccaactaactttgacaccattccatattacaagttcccttctatgactaaactccgtatccgtccccctgctcatgctgttgatgaggagtatattgctaagtataatttggccataagtcgaatgaaagatcttgataagacagaccctttaaaccctctt

SEQ ID NO: 1247 - DNA, 514 bp, Artificial
  Mutation introduced by TALE nuclease pair POT33_T01 within a POT33 allele
caagtgtgtgcaatagtagttctactactacaactctcaaaactcctttcatttcatccaatacttctttaggttccactcctaagccctttcctccatggaaaacgtaacaaaactttcaaagtctcttgcaaagtttctaatagtggtgaccaaaaccaaaacattgaaacgaattctgttgatcgaagaaatgttcttcttggcttaggaggtctttatggtgttgctaatgctataccattagcagcatcggctactcctataccatcccctgatctcaaaacttgtggtagagccaccatatcggatggtccactagtaccctatacttgttgcccccctcctatgccaactaactttgacaccattccatattacaagttcccttctatgactaaactccgtatccgtccccctgctcatgctgttgatgaggagtatacttgctaagtataatttggccataagtcgaatgaaagatcttgataagacagaccctttaaaccctctt

SEQ ID NO: 1248 - DNA, 517 bp, Artificial
  Mutation introduced by TALE nuclease pair POT33_T01 within a POT33 allele
caagtgtgtgcaatagtagttctactactacaactctcaaaactcctttcatttcatccaatacttctttaggttccactcctaaagccctcctccatcggaaaacggtaaacaaaacttactaaagtctcttgcaaaagttttctaatagtggtgaccaaaaccaaaacattgaaacgaattctgttgatcgaagaaatgttcttcttggcttaggaggtctttatggtgttgctaatgctataccattagcagcatcggctactcctataccatcccctgatctcaaaacttgtggtagagccaccatatcggatggtccactagtaccctatacttgttgcccccctcctatgccaactaactttgacaccattccatattacaagttcccttctatgactaaactccgtatccgtcccctgctcatgctgttgatgaggagtatattgctaagtataatttggccataagtcgaatgaaagatcttgataagacagaccctttaaaccctctt

SEQ ID NO: 1249 - DNA, 511 bp, Artificial
  Mutation introduced by TALE nuclease pair POT33_T01 within a POT33 allele
caagtgtgtgcaatagtagttctactactacaactctcaaaactcctttcatttcatccaatacttctttaggttccactcctaagccctctcctccatggaaaacgtaacaaaactttcaaagtctcttgcaaagtttctaatagtggtgaccaaaaccaaaacattgaaacgaattctgttgatcgaagaaatgttcttcttggcttaggaggtctttatggtgttgctaatgctataccattagcagcatcggctactcctataccatcccctgatctcaaaacttgtggtagagccaccatatcggatggtccactagtaccctatacttgttgccccctcctatgccaactaactttgacaccattccatattacaagttcccttctatgactaaactccgtatccgtcccctgctcatgctgttgatgaggagtatattgctaagtataatttggccataagtcgaatgaaagatcttgataagacagaccctttaaaccctctt

SEQ ID NO: 1250 - DNA, 507 bp, Artificial
  Mutation introduced by TALE nuclease pair POT33_T01 within a POT33 allele
caagtgtgtgcaatagtagttctactactacaactctcaaaactcctttcatttcatccaatacttctttaggttccactcctaagcatcctccatggaaaacgtaacaaaactttcaaagtctcttgcaaagtttctaatagtggtgaccaaaaccaaaacattgaaacgaattctgttgatcgaagaaatgttcttcttggcttaggaggtctttatggtgttgctaatgctataccattagcagcatcggctactcctataccatcccctgatctcaaaacttgtggtagagccaccatatcggatggtccactagtaccctatacttgttgccccctcctatgccaactaacttgacaccattccatattacaagttcccttctatgactaaactccgtatccgtcccctgctcatgctgttgatgaggagtatattgctaagtataatttggccataagtcgaatgaaagatcttgataagacagaccctttaaaccctctt

SEQ ID NO: 1251 - DNA, 511 bp, Artificial
  Mutation introduced by TALE nuclease pair POT33_T01 within a POT33 allele
caagtgtgtgcaatagtagttctactactacaactctcaaaactcctttcatttcatccaatacttctttaggttccactcctaagcttttcctccatggaaaacgtaacaaaactttcaaagtctcttgcaaagtttctaatagtggtgaccaaaaccaaaacattgaaacgaattctgttgatcgaagaaatgttcttcttggcttaggaggtctttatggtgttgctaatgctataccattagcagcatcggctactcctataccatcccctgatctcaaaacttgtggtagagccaccatatcggatggtccactagtaccctatacttgttgcccccctcctatgccaactaactttgacaccattccatattacaagttcccttctatgactaaactccgtatccgtcccctgctcatgctgttgatgaggagtatattgctaagtataatttggccataagtcgaatgaaagatcttgataagacagaccctttaaaccctctt

SEQ ID NO: 1252 - DNA, 516 bp, Artificial
  Mutation introduced by TALE nuclease pair POT33_T01 within a POT33 allele
caagtgtgtgcaatagtagttctactactacaactctcaaaactcctttcatttcatccaatacttctttaggttccactcctaagccctctttcctccatggaaaacgtaacaaaactttcaaagtctcttgcaaagtttctaatagtggtgaccaaaaccaaaacattgaaacgaattctgttgatcgaagaaatgttcttcttggcttaggaggtctttatggtgttgctaatgctataccattagcagcatcggctactcctataccatcccctgatctcaaaacttgtggtagagccaccatatcggatggtccactagtaccctatacttgttgcccccctcctatgccaactaactttgacaccattccatattacaagttcccttctatgactaaactccgtatccgtccccctgctcatgctgttgatgagggagtatattgctaagtataatttggccataagtcgaatgaaagatcttgataagacagaccctttaaaccctctt

SEQ ID NO: 1253 - DNA, 512 bp, Artificial
  Mutation introduced by TALE nuclease pair POT33_T01 within a POT33 allele
caagtgtgtgcaatagtagttctactactacaactctcaaaactcctttcatttcatccaatacttctttaggttccactcctaagcccttttcctccatggaaaacgtaacaaaactttcaaagtctcttgcaaagtttctaatagtggtgaccaaaaccaaaacattgaaacgaattctgttgatcgaagaaatgttcttcttggcttaggaggtctttatggtgttgctaatgctataccattagcagcatcggctactcctataccatcccctgatctcaaaacttgtggtagagccaccatatcggatggtccactagtaccctatacttgttgccccctcctatgccaactaactttgacaccattccatattacaagttcccttctatgactaaactccgtatccgtcccctgctcatgctgttgatgaggagtatattgctaagtataatttggccataagtcgaatgaaagatcttgataagacagaccctttaaaccctctt

SEQ ID NO: 1254 - DNA, 516 bp, Artificial
  Mutation introduced by TALE nuclease pair POT33_T01 within a POT33 allele
caagtgtgtgcaatagtagttctactactacaactctcaaaactcctttcatttcatccaatacttctttaggttccactcctaagccctttccttcctcgaaatcgaaacaagacttaactaaagtctcttgcaaagtttctaatagtggtgaccaaaaccaaaacattgaaacgaattctgttgatcgaagaaatgttcttcttggcttaggaggtctttatggtgttgctaatgctataccattagcagcatcggctactcctataccatccccctgatctcaaaacttgtggtagagccaccatatcggatggtccactagtaccctatacttgttgcccccctcctatgccaactaactttgacaccattccatattacaagttcccttctatgactaaactccgtatccgtccccctgctcatgctgttgatgaggagtatattgctaagtataatttggccataagtcgaatgaaagatcttgataagacagaccctttaaaccctctt

SEQ ID NO: 1255 - DNA, 511 bp, Artificial
  Mutation introduced by TALE nuclease pair POT33_T01 within a POT33 allele
caagtgtgtgcaatagtagttctactactacaactctcaaaactcctttcatttcatccaatacttctttaggttccactcctaagccctttcctccatggaaaacgtaacaaaactttcaaagtctcttgcaaagtttctaatagtggtgaccaaaaccaaaacattgaaacgaattctgttgatcgaagaaatgttcttcttggcttaggaggtctttatggtgttgctaatgctataccattagcagcatcggctactcctataccatcccctgatctcaaaacttgtggtagagccaccatatcggatggtccactagtaccctatacttgttgccccctcctatgccaactaactttgacaccattccatattacaagttcccttctatgactaaactccgtatccgtcccctgctcatgctgttgatgaggagtatattgctaagtataatttggccataagtcgaatgaaagatcttgataagacagaccctttaaaccctctt

SEQ ID NO: 1256 - DNA, 512 bp, Artificial
  Mutation introduced by TALE nuclease pair POT33_T01 within a POT33 allele
caagtgtgtgcaatagtagttctactactacaactctcaaaactcctttcatttcatccaatacttctttaggttccactcctaagcccttttccttcctcgaaacgtaacaaacttactaaagtctcttgcaaagttttctaatagtggtgaccaaaaccaaaacattgaaacgaattctgttgatcgaagaaatgttcttcttggcttaggaggtctttatggtgttgctaatgctataccattagcagcatcggctactcctataccatcccctgatctcaaaacttgtggtagagccaccatatcggatggtccactagtaccctatacttgttgccccctcctatgccaactaactttgacaccattccatattacaagttcccttctatgactaaactccgtatccgtcccctgctcatgctgttgatgaggagtatattgctaagtataatttggccataagtcgaatgaaagatcttgataagacagaccctttaaaccctctt

SEQ ID NO: 1257 - DNA, 512 bp, Artificial
  Mutation introduced by TALE nuclease pair POT33_T01 within a POT33 allele
caagtgtgtgcaatagtagttctactactacaactctcaaaactcctttcatttcatccaatacttctttaggttccactcctaagcccttcctccatggaaaacgtaacaaaactttcaaagtctcttgcaaagtttctaatagtggtgaccaaaaccaaaacattgaaacgaattctgttgatcgaagaaatgttcttcttggcttaggaggtctttatggtgttgctaatgctataccattagcagcatcggctactcctataccatcccctgatctcaaaacttgtggtagagccaccatatcggatggtccactagtaccctatacttgttgcccccctcctatgccaactaactttgacaccattccatattacaagttcccttctatgactaaactccgtatccgtccccctgctcatgctgttgatgaggagtatattgctaagtataatttggccataagtcgaatgaaagatcttgataagacagaccctttaaaccctctt

SEQ ID NO: 1258 - DNA, 512 bp, Artificial
  Mutation introduced by TALE nuclease pair POT33_T01 within a POT33 allele
caagtgtgtgcaatagtagttctactactacaactctcaaaactcctttcatttcatccaatacttctttaggttccactcctaagccctctcctccatggaaaacgtaacaaaactttcaaagtctcttgcaaagtttctaatagtggtgaccaaaaccaaaacattgaaacgaattctgttgatcgaagaaatgttcttcttggcttaggaggtctttatggtgttgctaatgctataccattagcagcatcggctactcctataccatcccctgatctcaaaacttgtggtagagccaccatatcggatggtccactagtaccctatacttgttgccccctcctatgccaactaactttgacaccattccatattacaagttcccttctatgactaaactccgtatccgtccccctgctcatgctgttgatgagggatatattgctaagtataatttggccataagtcgaatgaaagatcttgataagacagaccctttaaaccctctt

SEQ ID NO: 1259 - DNA, 514 bp, Artificial
  Mutation introduced by TALE nuclease pair POT33_T01 within a POT33 allele
caagtgtgtgcaatagtagttctactactacaactctcaaaactcctttcatttcatccaatacttctttaggttccactcctaagccctcttttcctccatggaaaacgtaacaaaactttcaaagtctcttgcaaagtttctaatagtggtgaccaaaaccaaaacattgaaacgaattctgttgatcgaagaaatgttcttcttggcttaggaggtctttatggtgttgctaatgctataccattagcagcatcggctactcctataccatcccctgatctcaaaacttgtggtagagccaccatatcggatggtccactagtaccctatacttgttgccccctcctatgccaactaactttgacaccattccatattacaagttcccttctatgactaaactccgtatccgtcccctgctcatgctgttgatgaggagtatattgctaagtataatttggtcataagtcgaatgaaagatcttgataagacagaccctttaaaccctctt

SEQ ID NO: 1260 - DNA, 513 bp, Artificial
  Mutation introduced by TALE nuclease pair POT33_T01 within a POT33 allele
caagtgtgtgcaatagtagttctactactacaactctcaaaactcctttcatttcatccaatacttctttaggttccactcctaagcccttttcctccatggaaaacgtaacaaaactttcaaagtctcttgcaaagtttctaatagtggtgaccaaaaccaaaacattgaaacgaattctgttgatcgaagaaatgttcttcttggcttaggaggtctttatggtgttgctaatgctataccattagcagcatcggctactcctataccatcccctgatctcaaaacttgtggtagagccaccatatcggatggtccactagtaccctatacttgttgccccctcctatgccaactaactttgacaccattccatattacaagttcccttctatgactaaactccgtatccgtccccctgctcatgctgttgatgaggagtatattgctaagtataatttggccataagtcgaatgaaagatcttgataagacagaccctttaaaccctctt

SEQ ID NO: 1261 - DNA, 508 bp, Artificial
  Mutation introduced by TALE nuclease pair POT33_T01 within a POT33 allele
caagtgtgtgcaatagtagttctactactacaactctcaaaactcctttcatttcatccaatacttctttaggttccactcctaagccctctccatggaaaacgtaacaaaactttcaaagtctcttgcaaagtttctaatagtggtgaccaaaaccaaaacattgaaacgaattctgttgatcgaagaaatgttcttcttggcttaggaggtctttatggtgttgctaatgctataccattagcagcatcggctactcctataccatcccctgatctcaaaacttgtggtagagccaccatatcggatggtccactagtaccctatacttgttgccccctcctatgccaactaactttgacaccattccatattacaagttcccttctatgactaaactccgtatccgtcccctgctcatgctgttgatgaggagtatattgctaagtataatttggccataagtcgaatgaaagatcttgataagacagaccctttaaaccctctt

SEQ ID NO: 1262 - DNA, 512 bp, Artificial
  Mutation introduced by TALE nuclease pair POT33_T01 within a POT33 allele
caagtgtgtgcaatagtagttctactactacaactctcaaaactcctttcatttcatccaatacttctttaggttccactcctaagtcctctcctccatggaaaacgtaacaaaactttcaaagtctcttgcaaagtttctaatagtggtgaccaaaaccaaaacattgaaacgaattctgttgatcgaagaaatgttcttcttggcttaggaggtctttatggtgttgctaatgctataccattagcagcatcggctactcctataccatcccctgatctcaaaacttgtggtagagccaccatatcggatggtccactagtaccctatacttgttgcccccctcctatgccaactaactttgacaccattccatattacaagttcccttctatgactaaactccgtatccgtcccctgctcatgctgttgatgaggagtatattgctaagtataatttggccataagtcgaatgaaagatcttgataagacagaccctttaaaccctctt

SEQ ID NO: 1263 - DNA, 513 bp, Artificial
  Mutation introduced by TALE nuclease pair POT33_T01 within a POT33 allele
caagtgtgtgcaatagtagttctactactacaactctcaaaactcctttcatttcatccaatacttctttaggttccactcctaagccctcttcctccatggaaaacgtaacaaaactttcaaagtctcttgcaaagtttctaatagtggtgaccaaaaccaaaacattgaaacgaattctgttgatcgaagaaatgttcttcttggcttaggaggtctttatggtgttgctaatgctataccattagcagcatcggctactcctataccatcccctgatctcaaaacttgtggtagagccaccatatcggatggtccactagtaccctatacttgttgcccccctcctatgccaactaactttgacaccattccatattacaagttcccttctatgactaaactccgtatccgtcccctgctcatgctgttgatgaggagtatattgctaagtataatttggccataagtcgaatgaaagatcttgataagacagaccctttaaaccctctt

SEQ ID NO: 1264 - DNA, 514 bp, Artificial
  Mutation introduced by TALE nuclease pair POT33_T01 within a POT33 allele
caagtgtgtgcaatagtagttctactactacaactctcaaaactcctttcatttcatccaatacttctttaggttccactcctaagcccttttcctccatggaaaacgtaacaaaactttcaaagtctcttgcaaagtttctaatagtggtgaccaaaaccaaaacattgaaacgaattctgttgatcgaagaaatgttcttcttggcttaggaggtctttatggtgttgctaatgctataccattagcagcatcggctactcctataccagtcccctgatctcaaaacttgtggtagagccaccatatcggatggtccactagtaccctatacttgttgcccccctcctatgccaactaactttgacaccattccatattacaagttcccttctatgactaaactccgtatccgtcccctgctcatgctgttgatgaggagtatattgctaagtataatttggccataagtcgaatgaaagatcttgataagacagaccctttaaaccctctt

SEQ ID NO: 1265 - DNA, 515 bp, Artificial
  Mutation introduced by TALE nuclease pair POT33_T01 within a POT33 allele
caagtgtgtgcaatagtagttctactactacaactctcaaaactcctttcatttcatccaatacttctttaggttccactcctaagccctctcttcctccatggaaaacgtaacaaaactttcaaagtctcttgcaaagtttctaatagtggtgaccaaaaccaaaacattgaaacgaattctgttgatcgaagaaatgttcttcttggcttaggaggtctttatggtgttgctaatgctataccattagcagcatcggctactcctataccatcccctgatctcaaaacttgtggtagagccaccatatcggatggtccactagtaccctatacttgttgcccccctcctatgccaactaactttgacaccattccatattacaagttcccttctatgactaaactccgtatccgtcccctgctcatgctgttgatgaggagtatattgctaagtataatttggccataagtcgaatgaaagatcttgataagacagaccctttaaaccctctt

SEQ ID NO: 1266 - DNA, 511 bp, Artificial
  Mutation introduced by TALE nuclease pair POT33_T01 within a POT33 allele
caagtgtgtgcaatagtagttctactactacaactctcaaaactcctttcatttcatccaatacttctttaggttccactcctaagcccttttcctccatggaaaacgtaacaaaactttcaaagtctcttgcaaagtttctaatagtggtgaccaaaaccaaaacattgaaacgaattctgttgatcgaagaaatgttcttcttggcttaggaggtctttatggtgttgctaatgctataccattagcagcatcggctactcctataccatcccctgatctcaaaacttgtggtagcgcaccatatcggatggtccactagtaccctatacttgttgccccctcctatgccaactaactttgacaccattccatattacaagttcccttctatgactaaactccgtatccgtcccctgctcatgctgttgatgaggagtatattgctaagtataatttggccataagtcgaatgaaagatcttgataagacagaccctttaaaccctctt

SEQ ID NO: 1267 - DNA, 513 bp, Artificial
  Mutation introduced by TALE nuclease pair POT33_T01 within a POT33 allele
caagtgtgtgcaataggtagttctactactacaactctcaaaactcctttcatttcatccaatacttctttaggttccactcctaagccttcctccatggaaaacgtaacaaaactttcaaagtctcttgcaaagtttctaatagtggtgaccaaaaccaaaacattgaaacgaattctgttgatcgaagaaatgttcttcttggcttaggaggtctttatggtgttgctaatgctataccattagcagcatcggctactcctataccatccccctgatctcaaaacttgtggtagagccaccatatcggatggtccactagtaccctatacttgttgcccccctcctatgccaactaactttgacaccattccatattacaagttcccttctatgactaaactccgtatccgtccccctgctcatgctgttgatgaggagtatattgctaagtataatttggccataagtcgaatgaaagatcttgataagacagaccctttaaaccctctt

SEQ ID NO: 1268 - DNA, 511 bp, Artificial
  Mutation introduced by TALE nuclease pair POT33_T01 within a POT33 allele
caagtgtgtgcaatagtagttctactactacaactctcaaaactcctttcatttcatccaatacttctttaggttccactcctaagcatcctccatggaaaacgtaacaaaactttcaaagtctcttgcaaagtttctaatagtggtgaccaaaaccaaaacattgaaacgaattctgttgatcgaagaaatgttcttcttggcttaggaggtctttatggtgttgctaatgctataccattagcagcatcggctactcctataccatcccctgatctcaaaacttgtggtagagccaccatatcggatggtccactagtaccctatacttgttgcccccctcctatgccaactaactttgacaccattccatattacaagttcccttctatgactaaactccgtatccgtccccctgctcatgctgttgatgagggagtatattgctaagtataatttggccataagtcgaatgaaagatcttgataagacagaccctttaaaccctctt

SEQ ID NO: 1269 - DNA, 513 bp, Artificial
  Mutation introduced by TALE nuclease pair POT33_T01 within a POT33 allele
caagtgtgtgcaatagtagttctactactacaactctcaaaactcctttcatttcatccaatacttctttaggttccactcctaagcccttttcctccatggaaaacgtaacaaaactttcaaagtctcttgcaaagtttctaatagtggtgaccaaaaccaaaacattgaaacgaattctgttgatcgaagaaatgttcttcttggcttaggaggtctttatggtgttgctaatgctataccattagcagcatcggctactcctataccatcccctgatctcaaaacttgtggtagagccaccatatcggatggtccactagtaccctatacttgttgcccccctcctatgccaactaactttgacaccattccatattacaagttcccttctatgactaaactccgtatccgtcccctgctcatgctgttgatgaggagtatattgctaagtataatttggccataagtcgaatgaaagatcttgataagacagaccctttaaaccctctt

SEQ ID NO: 1270 - DNA, 518 bp, Artificial
  Mutation introduced by TALE nuclease pair POT33_T01 within a POT33 allele
caagtgtgtgcaatagtagttctactactacaactctcaaaactcctttcatttcatccaatacttctttaggttccactcctaagccctattcctccatggaaaacgtaacaaaactttcaaagtcatcttgcaaagtttctaatagatggtgaccaaaaccaaaacattgaaacgaattctgttgatcgaagaaatgttcttcttggcttaggaggtctttatggtgttgctaatgctataccattagcagcatcggctactcctataccatcccctgatctcaaaacttgtggtagagccaccatatcggatggtccactagtaccctatacttgttgcccccctcctatgccaactaactttgacaccattccatattacaagttcccttctatgactaaactccgtatccgtccccctgctcatgctgttgatgagggagtatatttgctaagtataatttggccataagtcgaatgaaagatcttgataagacagaccctttaaaccctctt

SEQ ID NO: 1271 - DNA, 513 bp, Artificial
  Mutation introduced by TALE nuclease pair POT33_T01 within a POT33 allele
caagtgtgtgcaatagtagttctactactacaactctcaaaactcctttcatttcatccaatacttctttaggttccactcctaagcccctccatggaaacgtgaaacaaaacattctaagtcatcttgcaagtttgcatgtaatagtagtggaccaaaaccaaaacattgaaacgaattctgttgatcgaagaaatgttcttcttggcttaggaggtctttatggtgttgctaatgctataccattagcagcatcggctactcctataccatcccctgatctcaaaacttgtggtagagccaccatatcggatggtccactagtaccctatacttgttgccccctcctatgccaactaactttgacaccattccatattacaagttcccttctatgactaaactccgtatccgtcccctgctcatgctgttgatgaggagtatattgctaagtataatttggccataagtcgaatgaaagatcttgataagacagaccctttaaaccctctt

SEQ ID NO: 1272 - DNA, 514 bp, Artificial
  Mutation introduced by TALE nuclease pair POT33_T01 within a POT33 allele
caagtgtgtgcaatagtagttctactactacaactctcaaaactcctttcatttcatccaatacttctttaggttccactcctaagccctctcttcctccatggaaaacgtaacaaaactttcaaagtctcttgcaaagtttctaatagtggtgaccaaaaccaaaacattgaaacgaattctgttgatcgaagaaatgttcttcttggcttaggaggtctttatggtgttgctaatgctataccattagcagcatcggctactcctataccatcccctgatctcaaaacttgtggtagagccaccatatcggatggtccactagtaccctatacttgttgccccctcctatgccaactaactttgacaccattccatattacaagttcccttctatgactaaactccgtatccgtcccctgctcatgctgttgatgaggagtatattgctaagtataatttggccataagtcgaatgaaagatcttgataagacagaccctttaaaccctctt

SEQ ID NO: 1273 - DNA, 512 bp, Artificial
  Mutation introduced by TALE nuclease pair POT33_T01 within a POT33 allele
caagtgtgtgcaatagtagttctactactacaactctcaaaactcctttcatttcatccaatacttctttaggttccactcctaagccttttcctccatggaaaacgtaacaaaactttcaaagtctcttgcaaagtttctaatagtggtgaccaaaaccaaaacattgaaacgaattctgttgatcgaagaaatgttcttcttggcttaggaggtctttatggtgttgctaatgctataccattagcagcatcggctactcctataccatcccctgatctcaaaacttgtggtagagccaccatatcggatggtccactagtaccctatacttgttgcccccctcctatgccaactaactttgacaccattccatattacaagttcccttctatgactaaactccgtatccgtcccctgctcatgctgttgatgaggagtatattgctaagtataatttggccataagtcgaatgaaagatcttgataagacagaccctttaaaccctctt

SEQ ID NO: 1274 - DNA, 508 bp, Artificial
  Mutation introduced by TALE nuclease pair POT33_T01 within a POT33 allele
caagtgtgtgcaatagtagttctactactacaactctcaaaactcctttcatttcatccaatacttctttaggttccactcctaagcatcctccatggaaaacgtaacaaaactttcaaagtctcttgcaaagtttctaatagtggtgaccaaaaccaaaacattgaaacgaattctgttgatcgaagaaatgttcttcttggcttaggaggtctttatggtgttgctaatgctataccattagcagcatcggctactcctataccatcccctgatctcaaaacttgtggtagagccaccatatcggatggtccactagtaccctatacttgttgccccctcctatgccaactaactttgacaccattccatattacaagttcccttctatgactaaactccgtatccgtcccctgctcatgctgttgatgaggagtatattgctaagtataatttggccataagtcgaatgaaagatcttgataagacagaccctttaaaccctctt

SEQ ID NO: 1275 - DNA, 522 bp, Artificial
  Mutation introduced by TALE nuclease pair POT33_T01 within a POT33 allele
  misc_feature (90): n is a or c or t or g
caagtgtgtgcaatagtagttctactactacaactctcaaaactcctttcatttcatccaatacttctttaggttccactcctaagcccnccatcattcctttcctcatggaaaacgtaacaaaactttcaaagtctcttgcaaagtttctaatagtggtgaccaaaaccaaaacattgaaacgaattctgttgatcgaagaaatgttcttcttggcttaggaggtctttatggtgttgctaatgctataccattagcagcatcggctactcctataccatcccctgatctcaaaacttgtggtagagccaccatatcggatggtccactagtaccctatacttgttgcccccctcctatgccaactaactttgacaccattccatattacaagttcccttctatgactaaactccgtatccgtcccctgctcatgctgttgatgaggagtatattgctaagtataatttggccataagtcgaatgaaagatcttgataagacagaccctttaaaccctctt

SEQ ID NO: 1276 - DNA, 514 bp, Artificial
  Mutation introduced by TALE nuclease pair POT33_T01 within a POT33 allele
caagtgtgtgcaatagtagttctactactacaactctcaaaactcctttcatttcatccaatacttctttaggttccactcctaagccctcttttcctccatggaaaacgtaacaaaactttcaaagtctcttgcaaagtttctaatagtggtgaccaaaaccaaaacattgaaacgaattctgttgatcgaagaaatgttcttcttggcttaggaggtctttatggtgttgctaatgctataccattagcagcatcggctactcctataccatcccctgatctcaaaacttgtggtagagccaccatatcggatggtccactagtaccctatacttgttgccccctcctatgccaactaactttgacaccattccatattacaagttcccttctatgactaaactccgtatccgtcccctgctcatgctgttgatgaggagtatattgctaagtataatttggccataagtcgaatgaaagatcttgataagacagaccctttaaaccctctt

SEQ ID NO: 1277 - DNA, 513 bp, Artificial
  Mutation introduced by TALE nuclease pair POT33_T01 within a POT33 allele
caagtgtgtgcaatagtagttctactactacaactctcaaaactcctttcatttcatccaatacttctttaggttccactcctaagccctctcctccatggaaaacgtaacaaaactttcaaagtctcttgcaaaagtttctaatagtggtgaccaaaaccaaaacattgaaacgaattctgttgatcgaagaaatgttcttcttggcttaggaggtctttatggtgttgctaatgctataccattagcagcatcggctactcctataccatcccctgatctcaaaacttgtggtagagccaccatatcggatggtccactagtaccctatacttgttgcccccctcctatgccaactaactttgacaccattccatattacaagttcccttctatgactaaactccgtatccgtcccctgctcatgctgttgatgaggagtatattgctaagtataatttggccataagtcgaatgaaagatcttgataagacagaccctttaaaccctctt

SEQ ID NO: 1278 - DNA, 512 bp, Artificial
  Mutation introduced by TALE nuclease pair POT33_T01 within a POT33 allele
caagtgtgtgcaatagtagttctactactacaactctcaaaactcctttcatttcatccaatacttctttaggttccactcctaagccctccatggaaacgtaaacaaaacattctaaagtcatcttgcaaagtttcattaatagtaggtggaccaaaaccaaaacattgaaacgaattctgttgatcgaagaaatgttcttcttggcttaggaggtcttatggtgttgctaatgctataccattagcagcatcggctactcctataccatccctgatctcaaaacttgtggtagagccaccatatcggatggtccactagtaccctatacttgttgcccccctcctatgccaactaactttgacaccattccatattacaagttcccttctatgactaaactccgtatccgtccccctgctcatgctgttgatgaggagtatattgctaagtataatttggccataagtcgaatgaaagatcttgataagacagaccctttaaaccctctt

SEQ ID NO: 1279 - DNA, 441 bp, Artificial
  Mutation introduced by TALE nuclease pair POT33_T01 within a POT33 allele
caagtgtgtgcaatagtagttctactactacaactctcaaaactcctttcatttcatccaatacttctttaggttccactcctaagcccttttcctccatggaaatcgtacaaaacttcaaaagttcatcttgcaaagtttctaatagatggtgaccaaaccaaaacattgaacagaattctgttgatcgaagaaatgttcttcattggcttaggaggtctttatggtgttgctaatgactataccattagcagcatcggctactcctataccatcccctgatctcaaaacttgtggtagagccaccatatcggatggtccactagtaccctatacttgttgccccctcctatgccaactaactttgacaccattccatattacaagttcccttctatgactaaactccgtatccgtcccctgctcatgctgttgatagga

SEQ ID NO: 1280 - DNA, 515 bp, Artificial
  Mutation introduced by TALE nuclease pair POT33_T01 within a POT33 allele
caagtgtgtgcaatagtagttctactactacaactctcaaaactcctttcattcatccaatcacttctttatggttccatctcctaaagccctcttcctccatggaaaacgtaacaaaactttcaaagtctcttgcaaagtttctaatagtggtgaccaaaaccaaaacattgaaacgaattctgttgatcgaagaaatgttcttcttggcttaggaggtctttatggtgttgctaatgctataccattagcagcatcggctactcctataccatcccctgatctcaaaacttgtggtagagccaccatatcggatggtccactagtaccctatacttgttgccccctcctatgccaactaactttgacaccattccatattacaagttcccttctatgactaaactccgtatccgtcccctgctcatgctgttgatgaggagtatattgctaagtataatttggccataagtcgaatgaaagatcttgataagacagaccctttaaaccctctt

SEQ ID NO: 1281 - DNA, 511 bp, Artificial
  Mutation introduced by TALE nuclease pair POT33_T01 within a POT33 allele
caagtgtgtgcaatagtagttctactactacaactctcaaaactcctttcatttcatccaatacttctttaggttccactcctaagccctctttcctccatggaaacgtaacaaactttcaaagtctcttgcaaagtttctaatagtggtgaccaaaaccaaaacattgaaacgaattctgttgatcgaagaaatgttcttcttggcttaggaggtctttatggtgttgctaatgctataccattagcagcatcggctactcctataccatcccctgatctcaaaacttgtggtagagccaccatatcggatggtccactagtaccctatacttgttgccccctcctatgccaactaactttgacaccattccatattacaagttcccttctatgactaaactccgtatccgtcccctgctcatgctgttgatgaggagtatattgctaagtataatttggccataagtcgaatgaaagatcttgataagacagaccctttaaaccctctt

SEQ ID NO: 1282 - DNA, 478 bp, Artificial
  Mutation introduced by TALE nuclease pair POT33_T01 within a POT33 allele
caagtgtgtgcaatagtagttctactactacaactctcaaaactcctttcatttcatccaatactggaaaacgtaacaaaactttcaaagtctcttgcaaagtttctaatagtggtgaccaaaaccaaaacattgaaacgaattctgttgatcgaagaaatgttcttcttggcttaggaggtctttatggtgttgctaatgctataccattagcagcatcggctactcctataccatcccctgatctcaaaacttgtggtagagccaccatatcggatggtccactagtaccctatacttgttgcccccctcctatgccaactaactttgacaccattccatattacaagttcccttctatgactaaactccgtcatcgtcccctgctcatgctgttgatgaggagtatattgctaagtataatttggccataagtcgaatgaaagatcttgataagacagaccctttaaaccctctt

SEQ ID NO: 1283 - DNA, 513 bp, Artificial
  Mutation introduced by TALE nuclease pair POT33_T01 within a POT33 allele
caagtgtgtgcaatagtagttctactactacaactctcaaaactcctttcatttcatccaatacttctttaggttccactcctaagccctaattcctccatggaaaacgtaacaaaactttcaaagtctcttgcaaagtttctaatagtggtgaccaaaaccaaaacattgaaacgaattctgttgatcgaagaaatgttcttcttggcttaggaggtctttatggtgttgctaatgctataccattagcagcatcggctactcctataccatcccctgatctcaaaacttgtggtagagccaccatatcggatggtccactagtaccctatacttgttgccccctcctatgccaactaactttgacaccattccatattacaagttcccttctatgactaaactccgtatccgtcccctgctcatgctgttgatgaggagtatattgctaagtataatttggccataagtcgaatgaaagatcttgataagacagaccctttaaaccctctt

SEQ ID NO: 1284 - DNA, 514 bp, Artificial
  Mutation introduced by TALE nuclease pair POT33_T01 within a POT33 allele
caagtgtgtgcaatagtagttctactactacaactctcaaaactcctttcatttcatccaatacttctttaggttccactcctaagccctttttcctccatggaaaacgtaacaaaactttcaaagtctcttgcaaagtttctaatagtggtgaccaaaaccaaaacattgaaacgaattctgttgatcgaagaaatgttcttcttggcttaggaggtctttatggtgttgctaatgctataccattagcagcatcggctactcctataccatcccctgatctcaaaacttgtggtagagccaccatatcggatggtccactagtaccctatacttgttgcccccctcctatgccaactaactttgacaccattccatattacaagttcccttctatgactaaactccgtatccgtcccctgctcatgctgttgatgaggagtatattgctaagtataatttggccataagtcgaatgaaagatcttgataagacagaccctttaaaccctctt

SEQ ID NO: 1285 - DNA, 510 bp, Artificial
  Mutation introduced by TALE nuclease pair POT33_T01 within a POT33 allele
caagtgtgtgcaatagtagttctactactacaactctcaaaactcctttcatttcatccaatacttctttaggttccactcctaagcccttcctccatggaaaacgtaacaaaactttcaaagtctcttgcaaagtttctaatagtggtgaccaaaaccaaaacattgaaacgaattctgttgatcgaagaaatgttcttcttggcttaggaggtctttatggtgttgctaatgctataccattagcagcatcggctactcctataccatcccctgatctcaaaacttgtggtagagccaccatatcggatggtccactagtaccctatacttgttgccccctcctatgccaactaactttgacaccattccatattacaagttcccttctatgactaaactccgtatccgtcccctgctcatgctgttgatgaggagtatattgctaagtataatttggccataagtcgaatgaaagatcttgataagacagaccctttaaaccctctt

SEQ ID NO: 1286 - DNA, 500 bp, Artificial
  Mutation introduced by TALE nuclease pair POT33_T01 within a POT33 allele
caagtgtgtgcaatagttagttctactactacaactctcaaaactcctttcatttcatccaatacttctttaggttccacttggaaaacgtaacaaaactttcaaagtctcttgcaaagtttctaatagtggtgaccaaaaccaaaacattgaaacgaattctgttgatcgaagaaatgttcttcttggcttaggaggtctttatggtgttgctaatgctataccattagcagcatcggctactcctataccatcccctgatctcaaaacttgtggtagagccaccatatcggatggtccactagtaccctatacttgttgcccccctcctatgccaactaactttgtacaccattccatattcacaagttcccttcctatgactaaactccagtatccgtcccctgctccatgctgttgatgaggagtatattgctaagtataatttggccataagtcgaatgaaagatcttgataagacagaccctttaaaccctctt

SEQ ID NO: 1287 - DNA, 506 bp, Artificial
  Mutation introduced by TALE nuclease pair POT33_T01 within a POT33 allele
caagtgtgtgcaatagtagttctactactacaactctcaaaactcctttcatttcatccaatacttctttaggttccactcctaagccctccatggaaaacgtaacaaaactttcaaagtctcttgcaaagtttctaatagtggtgaccaaaaccaaaacattgaaacgaattctgttgatcgaagaaatgttcttcttggcttaggaggtctttatggtgttgctaatgctataccattagcagcatcggctactcctataccatcccctgatctcaaaacttgtggtagagccaccatatcggatggtccactagtaccctatacttgttgccccctcctatgccaactaactttgacaccattccatattacaagttcccttctatgactaaactccgtatccgtcccctgctcatgctgttgatgaggagtatattgctaagtataatttggccataagtcgaatgaaagatcttgataagacagaccctttaaaccctctt

SEQ ID NO: 1288 - DNA, 521 bp, Artificial
  Mutation introduced by TALE nuclease pair POT33_T01 within a POT33 allele
caagtgtgtgcaatagtagttctactactacaactctcaaaactcctttcatttcatccaatacttctttaggttccactcctaaagcccttttccttccatcggaaaatcggtaaacaaaacttactaaagtctcttgcaaaagttttctaatagtggtgaccaaaaccaaaacattgaaacgaattctgttgatcgaagaaatgttcttcttggcttaggaggtctttatggtgttgctaatgctataccattagcagcatcggctactcctataccatcccctgatctcaaaacttgtggtagagccaccatatcggatggtccactagtaccctatacttgttgccccctcctatgccaactaactttgacaccattccatattacaagttcccttctatgactaaactccgtatccgtcccctgctcatgctgttgatgaggagtatattgctaagtataatttggccataagtcgaatgaaagatcttgataagacagaccctttaaaccctctt

SEQ ID NO: 1289 - DNA, 511 bp, Artificial
  Mutation introduced by TALE nuclease pair POT33_T01 within a POT33 allele
caagtgtgtgcaatagtagttctactactacaactctcaaaactcctttcatttcatccaatacttctttaggttccactcctaagtcctctcctccatggaaaacgtaacaaaactttcaaagtctcttgcaaagtttctaatagtggtgaccaaaaccaaaacattgaaacgaattctgttgatcgaagaaatgttcttcttggcttaggaggtctttatggtgttgctaatgctataccattagcagcatcggctactcctataccatcccctgatctcaaaacttgtggtagagccaccatatcggatggtccactagtaccctatacttgttgccccctcctatgccaactaactttgacaccattccatattacaagttcccttctatgactaaactccgtatccgtcccctgctcatgctgttgatgaggagtatattgctaagtataatttggccataagtcgaatgaaagatcttgataagacagaccctttaaaccctctt

SEQ ID NO: 1290 - DNA, 512 bp, Artificial
  Mutation introduced by TALE nuclease pair POT33_T01 within a POT33 allele
caagtgtgtgcaatagtagttctactactacaactctcaaaactcctttcatttcatccaatacttctttaggttccactcctaagccctattcctccatggaaaacgtaacaaaactttcaaagtctcttgcaaagtttctaatagtggtgaccaaaaccaaaacattgaaacgaattctgttgatcgaagaaatgttcttcttggcttaggaggtctttatggtgttgctaatgctataccattagcagcatcggctactcctataccatcccctgatctcaaaacttgtggtagagccaccatatcggatggtccactagtaccctatacttgttgccccctcctatgccaactaactttgacaccattccatattacaagttcccttctatgactaaactccgtatccgtcccctgctcatgctgttgatgaggagtatattgctaagtataatttggccataagtcgaatgaaagatcttgataagacagaccctttaaaccctctt

SEQ ID NO: 1291 - DNA, 515 bp, Artificial
  Mutation introduced by TALE nuclease pair POT33_T01 within a POT33 allele
caagtgtgtgcaatagtagttctactactacaactctcaaaactcctttcatttcatccaatacttctttaggttccactcctaagccctctttttcctccatggaaaacgtaacaaaactttcaaagtctcttgcaaagtttctaatagtggtgaccaaaaccaaaacattgaaacgaattctgttgatcgaagaaatgttcttcttggcttaggaggtctttatggtgttgctaatgctataccattagcagcatcggctactcctataccatcccctgatctcaaaacttgtggtagagccaccatatcggatggtccactagtaccctatacttgttgccccctcctatgccaactaactttgacaccattccatattacaagttcccttctatgactaaactccgtatccgtcccctgctcatgctgttgatgaggagtatattgctaagtataatttggccataagtcgaatgaaagatcttgataagacagaccctttaaaccctctt

SEQ ID NO: 1292 - DNA, 509 bp, Artificial
  Mutation introduced by TALE nuclease pair POT33_T01 within a POT33 allele
caagtgtgtgcaatagtagttctactactacaactctcaaaactcctttcatttcatccaatacttctttaggttccactcctaagctttcctccatggaaaacgtaacaaaactttcaaagtctcttgcaaagtttctaatagtggtgaccaaaaccaaaacattgaaacgaattctgttgatcgaagaaatgttcttcttggcttaggaggtctttatggtgttgctaatgctataccattagcagcatcggctactcctataccatcccctgatctcaaaacttgtggtagagccaccatatcggatggtccactagtaccctatacttgttgccccctcctatgccaactaactttgacaccattccatattacaagttcccttctatgactaaactccgtatccgtcccctgctcatgctgttgatgaggagtatattgctaagtataatttggccataagtcgaatgaaagatcttgataagacagaccctttaaaccctctt

SEQ ID NO: 1293 - DNA, 513 bp, Artificial
  Mutation introduced by TALE nuclease pair POT33_T01 within a POT33 allele
caagtgtgtgcaatagtagttctactactacaactctcaaaactcctttcatttcatccaatacttctttaggttccactcctaagccctttttcctccatggaaaacgtaacaaaactttcaaagtctcttgcaaagtttctaatagtggtgaccaaaaccaaaacattgaaacgaattctgttgatcgaagaaatgttcttcttggcttaggaggtctttatggtgttgctaatgctataccattagcagcatcggctactcctataccatcccctgatctcaaaacttgtggtagagccaccatatcggatggtccactagtaccctatacttgttgccccctcctatgccaactaactttgacaccattccatattacaagttcccttctatgactaaactccgtatccgtcccctgctcatgctgttgatgaggagtatattgctaagtataatttggccataagtcgaatgaaagatcttgataagacagaccctttaaaccctctt

SEQ ID NO: 1294 - DNA, 497 bp, Artificial
  Mutation introduced by TALE nuclease pair POT33_T01 within a POT33 allele
  misc_feature (112); (114); (118): n is a or c or t or g
caagtgtgtgcaatagtagttctactactacaactctcaaaactcctttcatttcatccaatacttctttaggttccactcctaagcccttctcaacgaaacaacaatctanantcanttgcagttactagtgtgaccaaaaccaaaacattgaaacgaattctgttgatcgaagaaatgttcttcttggcttaggaggtctttatggtgttgctaatgctataccattagcagcatcggctactcctataccatcccctgatctcaaaacttgtggtagagccaccatatcggatggtccactagtaccctatacttgttgcccccctcctatgccaactaactttgacaccattccatattacaagttcccttctatgactaaactccgtatccgtccccctgctcatgctgttgatgaggagtatattgctaagtataatttggccataagtcgaatgaaagatcttgataagacagaccctttaaaccctctt

SEQ ID NO: 1295 - DNA, 445 bp, Artificial
  Mutation introduced by TALE nuclease pair POT33_T01 within a POT33 allele
caagtgtgtgcaatagtagttctactactacaactctcaaaactcctttcatttcatccaatacttctttaggttccactcctaagctctcttcctccatggaaaacgtaacaaaactttcaaagtctcttgcaaagtttctaatagtggtgaccaaaaccaaaacattgaaacgaattctgttgatcgaagaaatgttcttcttggcttaggaggtctttatggtgttgctaatgctataccattagcagcatcggctactcctataccatcccctgatctcaaaacttgtggtagagccaccatatcggatggtccactagtaccctatacttgttgcccccctcctatgccaactaactttgacaccattccatattacaagttcccttctatgactaaactccgtatccgtcccctgctcatgctgttgatgagggagtat

SEQ ID NO: 1296 - DNA, 511 bp, Artificial
  Mutation introduced by TALE nuclease pair POT33_T01 within a POT33 allele
caagtgtgtgcaatagtagttctactactacaactctcaaaactcctttcatttcatccaatacttctttaggttccactcctaagccttcctccatggaaaacgtaacaaaactttcaaagtctcttgcaaagttttctaatagtggtgaccaaaaccaaaacattgaaacgaattctgttgatcgaagaaatgttcttcttggcttaggaggtctttatggtgttgctaatgctataccattagcagcatcggctactcctataccatcccctgatctcaaaacttgtggtagagccaccatatcggatggtccactagtaccctatacttgttgcccccctcctatgccaactaactttgacaccattccatattacaagttcccttctatgactaaactccgtatccgtcccctgctcatgctgttgatgaggagtatattgctaagtataatttggccataagtcgaatggaagatcttgataagacagaccctttaaaccctctt

SEQ ID NO: 1297 - DNA, 516 bp, Artificial
  Mutation introduced by TALE nuclease pair POT33_T01 within a POT33 allele
caagtgtgtgcaatagtagttctactactacaactctcaaaactcctttcatttcatccaatacttctttaggttccactcctaagccctctcttcctccatggaaaacgtaacaaaactttcaaagtctcttgcaaagtttctaatagtggtgaccaaaaccaaaacattgaaacgaattctgttgatcgaagaaatgttcttcttggcttaggaggtctttatggtgttgctaatgctataccattagcagcatcggctactcctataccatcccctgatctcaaaacttgtggtagagccaccatatcggatggtccactagtaccctatacttgttgcccccctcctatgccaactaactttgacaccattccatattacaagttcccttctatgactaaactccgtatccgtccccctgctcatgctgttgatgaggagtatattgctaagtataatttggccataagtcgaatgaaagatcttgataagacagaccctttaaaccctctt

SEQ ID NO: 1298 - DNA, 512 bp, Artificial
  Mutation introduced by TALE nuclease pair POT33_T01 within a POT33 allele
caagtgtgtgcaatagtagttctactactacaactctcaaaactcctttcatttcatccaatacttctttaggttccactcctaagccttcctccatggaaaacgtaacaaaacttcaaagtctcttgcaaagtttctaatagtggtgaccaaaaccaaaacattgaaacgaattctgttgatcgaagaaatgttcttcttggcttaggaggtctttatggtgttgctaatgctataccattagcagcatcggctactcctataccatccccctgatctcaaaacttgtggtagagccaccatatcggatggtccactagtaccctatacttgttgcccccctcctatgccaactaactttgacaccattccatattacaagttcccttctatgactaaactccgtatccgtccccctgctcatgctgttgatgagggagtatattgctaagtataatttggccataagtcgaatgaaagatcttgataagacagaccctttaaaccctctt

SEQ ID NO: 1299 - DNA, 508 bp, Artificial
  Mutation introduced by TALE nuclease pair POT33_T01 within a POT33 allele
caagtgtgtgcaatagtagttctactactacaactctcaaaactcctttcatttcatccaatacttctttaggttccactcctaagttcctccatggaaaacgtaacaaaactttcaaagtctcttgcaaagtttctaatagtggtgaccaaaaccaaaacattgaaacgaattctgttgatcgaagaaatgttcttcttggcttaggaggtctttatggtgttgctaatgctataccattagcagcatcggctactcctataccatcccctgatctcaaaacttgtggtagagccaccatatcggatggtccactagtaccctatacttgttgcccccctcctatgccaactaactttgacaccattccatattacaagttcccttctatgactaaactccgtatccgtcccctgctcatgctgttgatgaggagtatattgctaagtataatttggccataagtcgaatgaaagatcttgataagacagaccctttaaaccctctt

SEQ ID NO: 1300 - DNA, 511 bp, Artificial
  Mutation introduced by TALE nuclease pair POT33_T01 within a POT33 allele
caagtgtgtgcaatagtagttctactactacaactctcaaaactcctttcatttcatccaatacttctttaggttccactcctaagccttcctccatggaaaacgtaacaaaactttcaaagtctcttgcaaagtttctaatagtggtgaccaaaaccaaaacattgaaacgaattctgttgatcgaagaaatgttcttcttggcttaggaggtctttatggtgttgctaatgctataccattagcagcatcggctactcctataccatcccctgatctcaaaacttgtggtagagccaccatatcggatggtccactagtaccctatacttgttgcccccctcctatgccaactaactttgacaccattccatattacaagttcccttctatgactaaactccgtatccgtccccctgctcatgctgttgatgaggagtatattgctaagtataatttggccataagtcgaatgaaagatcttgataagacagaccctttaaaccctctt

SEQ ID NO: 1301 - DNA, 517 bp, Artificial
  Mutation introduced by TALE nuclease pair POT33_T01 within a POT33 allele
caagtgtgtgcaatagtagttctactactacaactctcaaaactcctttcatttcatccaatacttctttaggttccactcctaagccctcttttcctccatggaaaacgtaacaaaactttcaaagtctcttgcaaagtttctaatagtggtgaccaaaaccaaaacattgaaacgaattctgttgatcgaagaaatgttcttcttggcttaggaggtctttatggtgttgctaatgctataccattagcagcatcggctactcctataccatcccctgatctcaaaacttgtggtagagccaccatatcggatggtccactagtaccctatacttgttgcccccctcctatgccaactaactttgacaccattccatattacaagttcccttctatgactaaactccgtatccgtccccctgctcatgctgttgatgagggataatattgctaagtataatttggccataagtcgaatgaaagatcttgataagacagaccctttaaaccctctt

SEQ ID NO: 1302 - DNA, 444 bp, Artificial
  Mutation introduced by TALE nuclease pair POT33_T01 within a POT33 allele
caagtgtgtgcaatagtagttctactactacaactctcaaaactcctttcatttcatccaatacttctttaggttccactcctaagctctcttcctccatggaaaacgtaacaaaactttcaaagtctcttgcaaagtttctaatagtggtgaccaaaaccaaaacattgaaacgaattctgttgatcgaagaaatgttcttcttggcttaggaggtctttatggtgttgctaatgctataccattagcagcatcggctactcctataccatcccctgatctcaaaacttgtggtagagccaccatatcggatggtccactagtaccctatacttgttgccccctcctatgccaactaactttgacaccattccatattacaagttcccttctatgactaaactccgtatccgtcccctgctcatgctgttgatgagggagtat

SEQ ID NO: 1303 - DNA, 511 bp, Artificial
  Mutation introduced by TALE nuclease pair POT33_T01 within a POT33 allele
caagtgtgtgcaatagtagttctactactacaactctcaaaactcctttcatttcatccaatacttctttaggttccactcctaagccctctctccatggaaaacgtaacaaaactttcaaagtctcttgcaaagtttctaatagtggtgaccaaaaccaaaacattgaaacgaattctgttgatcgaagaaatgttcttcttggcttaggaggtctttatggtgttgctaatgctataccattagcagcatcggctactcctataccatcccctgatctcaaaacttgtggtagagccaccatatcggatggtccactagtaccctatacttgttgcccccctcctatgccaactaactttgacaccattccatattacaagttcccttctatgactaaactccgtatccgtcccctgctcatgctgttgatgaggagtatattgctaagtataatttggccataagtcgaatgaaagatcttgataagacagaccctttaaaccctctt

SEQ ID NO: 1304 - DNA, 513 bp, Artificial
  Mutation introduced by TALE nuclease pair POT33_T01 within a POT33 allele
caagtgtgtgcaatagtagttctactactacaactctcaaaactcctttcatttcatccaatacttctttaggttccactcctaagccttttcctccatggaaaacgtaacaaaacttcaaagtctcttgcaaagtttctaatagtggtgaccaaaaccaaaacattgaaacgaattctgttgatcgaagaaatgttcttcttggcttaggaggtctttatggtgttgctaatgctataccattagcagcatcggctactcctataccatcccctgatctcaaaacttgtggtagagccaccatatcggatggtccactagtaccctatacttgttgcccccctcctatgccaactaactttgacaccattccatattacaagttcccttctatgactaaactccgtatccgtcccctgctcatgctgttgatgagggagtaatattgctaagtataatttggccataagtcgaatgaaagatcttgataagacagaccctttaaaccctctt

SEQ ID NO: 1305 - DNA, 509 bp, Artificial
  Mutation introduced by TALE nuclease pair POT33_T01 within a POT33 allele
caagtgtgtgcaatagtagttctactactacaactctcaaaactcctttcatttcatccaatacttctttaggttccactcctaagccttcctccatggaaaacgtaacaaaactttcaaagtctcttgcaaagtttctaatagtggtgaccaaaaccaaaacattgaaacgaattctgttgatcgaagaaatgttcttcttggcttaggaggtctttatggtgttgctaatgctataccattagcagcatcggctactcctataccatcccctgatctcaaaacttgtggtagagccaccatatcggatggtccactagtaccctatacttgttgccccctcctatgccaactaactttgacaccattccatattacaagttcccttctatgactaaactccgtatccgtcccctgctcatgctgttgatgaggagtatattgctaagtataatttggccataagtcgaatgaaagatcttgataagacagaccctttaaaccctctt

SEQ ID NO: 1306 - DNA, 512 bp, Artificial
  Mutation introduced by TALE nuclease pair POT33_T01 within a POT33 allele
caagtgtgtgcaatagtagttctactactacaactctcaaaactcctttcatttcatccaatacttctttaggttccactcctaagccctttcctccatggaaaacgtaacaaaactttcaaagtctcttgcaaagtttctaatagtggtgaccaaaaccaaaacattgaaacgaattctgttgatcgaagaaatgttcttcttggcttaggaggtctttatggtgttgctaatgctataccattagcagcatcggctactcctataccatcccctgatctcaaaacttgtggtagagccaccatatcggatggtccactagtaccctatacttgttgcccccctcctatgccaactaactttgacaccattccatattacaagttcccttctatgactaaactccgtatccgtcccctgctcatgctgttgatgaggagtatattgctaagtataatttggccataagtcgaatgaaagatcttgataagacagaccctttaaaccctctt

SEQ ID NO: 1307 - DNA, 510 bp, Artificial
  Mutation introduced by TALE nuclease pair POT33_T01 within a POT33 allele
caagtgtgtgcaatagtagttctactactacaactctcaaaactcctttcatttcatccaatacttctttaggttccactcctaagctttcctccatggaaaacgtaacaaaactttcaaagtctcttgcaaagtttctaatagtggtgaccaaaaccaaaacattgaaacgaattctgttgatcgaagaaatgttcttcttggcttaggaggtctttatggtgttgctaatgctataccattagcagcatcggctactcctataccatcccctgatctcaaaacttgtggtagagccaccatatcggatggtccactagtaccctatacttgttgcccccctcctatgccaactaactttgacaccattccatattacaagttcccttctatgactaaactccgtatccgtcccctgctcatgctgttgatgaggagtatattgctaagtataatttggccataagtcgaatgaaagatcttgataagacagaccctttaaaccctctt

SEQ ID NO: 1308 - DNA, 512 bp, Artificial
  Mutation introduced by TALE nuclease pair POT33_T01 within a POT33 allele
caagtgtgtgcaatagtagttctactactacaactctcaaaactcctttcatttcatccaatacttctttaggttccactcctaagccctcttcctccatggaaaacgtaacaaaactttcaaagtctcttgcaaagtttctaatagtggtgaccaaaaccaaaacattgaaacgaattctgttgatcgaagaaatgttcttcttggcttaggaggtctttatggtgttgctaatgctataccattagcagcatcggctactcctataccatcccctgatctcaaaacttgtggtagagccaccatatcggatggtccactagtaccctatacttgttgccccctcctatgccaactaactttgacaccattccatattacaagttcccttctatgactaaactccgtatccgtcccctgctcatgctgttgatgaggagtatattgctaagtataatttggccataagtcgaatgaaagatcttgataagacagaccctttaaaccctctt

SEQ ID NO: 1309 - DNA, 501 bp, Artificial
  Mutation introduced by TALE nuclease pair POT33_T01 within a POT33 allele
caagtgtgtgcaatagtagttctactactacaactctcaaaactcctttcatttcatccaatacttctttaggttccactcctaagccctctcatcttcctcatggaaaacgtaacaaaactttcaaagtctcttgcaaagtttctaatagtggtgaccaaaaccaaaacattgaaacgaattctgttgatcgaagaaatgttcttcttggcttaggaggtctttatggtgttgctaatgctataccattagcagcatcggctactcctataccatcccctgatctcaaaacttgtggtagagccaccatatcggatggtccactagtaccctatacttgttgcccccctcctatgccaactaactttgacaccattccatattacaagttcccttctatgactaaactccgtatccgtcccctgctcatgctgttgatgaggagtatattgctaagtataatttggccataagtcgaatgaaagatcttgataagacaga

SEQ ID NO: 1310 - DNA, 504 bp, Artificial
  Mutation introduced by TALE nuclease pair POT33_T01 within a POT33 allele
caagtgtgtgcaatagtagttctactactacaactctcaaaactcctttcatttcatccaatacttctttaggttccactcctaagcccatggaaaacgtaacaaaactttcaaagtctcttgcaaagtttctaatagtggtgaccaaaaccaaaacattgaaacgaattctgttgatcgaagaaatgttcttcttggcttaggaggtctttatggtgttgctaatgctataccattagcagcatcggctactcctataccatcccctgatctcaaaacttgtggtagagccaccatatcggatggtccactagtaccctatacttgttgcccccctcctatgccaactaactttgacaccattccatattacaagttcccttctatgactaaactccgtatccgtcccctgctcatgctgttgatgaggagtatattgctaagtataatttggccataagtcgaatgaaagatcttgataagacagaccctttaaaccctctt

SEQ ID NO: 1311 - DNA, 512 bp, Artificial
  Mutation introduced by TALE nuclease pair POT33_T01 within a POT33 allele
caagtgtgtgcaatagtagttctactactacaactctcaaaactcctttcatttcatccaatacttctttaggttccactcctaagccctttcctccatggaaaacgtaacaaaactttcaaagtctcttgcaaagtttctaatagtggtgaccaaaaccaaaacattgaaacgaattctgttgatcgaagaaatgttcttcttggcttaggaggtctttatggtgttgctaatgctataccattagcagcatcggctactcctataccatcccctgatctcaaaacttgtggtagagccaccatatcggatggtccactagtaccctatacttgttgccccctcctatgccaactaactttgacaccattccatattacaagttcccttctatgactaaactccgtatccgtcccctgctcatgctgttgatgaggagtatattgctaagtataatttggccataagtcgaatgaaagatcttgataagacagaccctttaaaccctcttt

SEQ ID NO: 1312 - DNA, 510 bp, Artificial
  Mutation introduced by TALE nuclease pair POT33_T01 within a POT33 allele
caagtgtgtgcaatagtagttctactactacaactctcaaaactcctttcatttcatccaatacttctttaggttccactcctaagcccttttcctccatggaaaacgtaacaaaactttcaaagtctcttgcaaagtttctaatagtggtgaccaaaaccaaaacattgaaacgaattctgttgatcgaagaaatgttcttcttggcttaggaggtctttatggtgttgctaatgctataccattagcagcatcggctactcctataccatcccctgatctcaaaacttgtgtagcgcaccatatcggatggtccactagtaccctatacttgttgccccctcctatgccaactaactttgacaccattccatattacaagttcccttctatgactaaactccgtatccgtcccctgctcatgctgttgatgaggagtatattgctaagtataatttggccataagtcgaatgaaagatcttgataagacagaccctttaaaccctctt

SEQ ID NO: 1313 - DNA, 508 bp, Artificial
  Mutation introduced by TALE nuclease pair POT33_T01 within a POT33 allele
caagtgtgtgcaatagtagttctactactacaactctcaaaactcctttcatttcatccaatacttctttaggttccactcctaagccctccatggaaaacgtaacaaaactttcaaagtctcttgcaaagtttctaatagtggtgaccaaaaccaaaacattgaaacgaattctgttgatcgaagaaatgttcttctggcttaggaggtctttatggtgttgctaatgctataccattagcagcatcggctactcctataccatcccctgatctcaaaacttgtggtagagccaccatatcggatggtccactagtaccctatacttgttgccccctcctatgccaactaactttgacaccattccatattacaagttcccttctatgactaaactccgtatccgtcccctgctcatgctgttgatgaggagtatattgctaagtataattttggccataagctgcatgaaatgaatcttgataagacagaccctttaaaccctctt

SEQ ID NO: 1314 - DNA, 515 bp, Artificial
  Mutation introduced by TALE nuclease pair POT33_T01 within a POT33 allele
caagtgtgtgcaatagtagttctactactacaactctcaaaactcctttcatttcatccaatacttctttaggttccactcctaagccctcttttcctccatggaaaacgtaacaaaactttcaaagtctcttgcaaagtttctaatagtggtgaccaaaaccaaaacattgaaacgaattctgttgatcgaagaaatgttcttcttggcttaggaggtctttatggtgttgctaatgctataccattagcagcatcggctactcctataccatcccctgatctcaaaacttgtggtagagccaccatatcggatggtccactagtaccctatacttgttgcccccctcctatgccaactaactttgacaccattccatattacaagttcccttctatgactaaactccgtatccgtcccctgctcatgctgttgatgaggagtatattgctaagtataatttggccataagtcgaatgaaagatcttgataagacagaccctttaaaccctctt

SEQ ID NO: 1315 - DNA, 516 bp, Artificial
  Mutation introduced by TALE nuclease pair POT33_T01 within a POT33 allele
caagtgtgtgcaatagtagttctactactacaactctcaaaactcctttcatttcatccaatacttctttaggttccactcctaagccctctcatccttcccatggaaaacgtaacaaaactttcaaagtctcttgcaaagtttctaatagtggtgaccaaaaccaaaacattgaaacgaattctgttgatcgaagaaatgttcttcttggcttaggaggtctttatggtgttgctaatgctataccattagcagcatcggctactcctataccatcccctgatctcaaaacttgtggtagagccaccatatcggatggtccactagtaccctatacttgttgccccctcctatgccaactaactttgacaccattccatattacaagttcccttctatgactaaactccgtatccgtcccctgctcatgctgttgatgaggagtatattgctaagtataatttggccataagtcgaatgaaagatcttgataagacagaccctttaaaccctctt

SEQ ID NO: 1316 - DNA, 440 bp, Artificial
  Mutation introduced by TALE nuclease pair POT33_T01 within a POT33 allele
caagtgtgtgcaatagtagttctactactacaactctcaaaactcctttcatttcatccaatacttctttaggttccactcctaagccctctttcctccatggaaaacgtaacaaaactttcaaagtctcttgcaaagtttctaatagtggtgaccaaaaccaaaacattgaaacgaattctgttgatcgaagaaatgttcttcttggcttaggaggtctttatggtgttgctaatgctataccattagcagcatcggctactcctataccatcccctgatctcaaaacttgtggtagagccaccatatcggatggtccactagtaccctatacttgttgccccctcctatgccaactaactttgacaccattccatattacaagttcccttctatgactaaactccgtatccgtcccctgctcatgctgttgattagga

SEQ ID NO: 1317 - DNA, 477 bp, Artificial
  Mutation introduced by TALE nuclease pair POT33_T01 within a POT33 allele
caagtgtgtgcaatagtagttctactactacaactctcaaaactcctttcatttcatccaatacttctttaggttccactcctaagtgtctcttgcaaagtttctaatagtggtgaccaaaaccaaaacattgaaacgaattctgttgatcgaagaaatgttcttcttggcttaggaggtctttatggtgttgctaatgctataccattagcagcatcggctactcctataccatcccctgatctcaaaacttgtggtagagccaccatatcggatggtccactagtaccctatacttgttgcccccctcctatgccaactaactttgacaccattccatattacaagttcccttctatgactaaactccgtatccgtcccctgctccatgctgttgatgaggagtatattgctaagtataatttggccataagtcgaatgaaagatcttgataagacagaccctttaaaccctctt

SEQ ID NO: 1318 - DNA, 512 bp, Artificial
  Mutation introduced by TALE nuclease pair POT33_T01 within a POT33 allele
caagtgtgtgcaatagtagttctactactacaactctcaaaactcctttcatttcatccaatacttctttaggttccactcctaagccctttttcctccatggaaaacgtaacaaaactttcaaagtctcttgcaaagtttctaatagtggtgaccaaaaccaaaacattgaaacgaattctgttgatcgaagaaatgttcttcttggcttaggaggtctttatggtgttgctaatgctataccattagcagcatcggctactcctataccatcccctgatctcaaaacttgtggtagagccaccatatcggatggtccactagtaccctatacttgttgccccctcctatgccaactaactttgacaccattccatattacaagttcccttctatgactaaactccgtatccgtcccctgctcatgctgttgatgaggagtatattgctaagtataatttggccataagtcgaatgaaagatcttgataagacagaccctttaaaccctct

SEQ ID NO: 1319 - DNA, 519 bp, Artificial
  Mutation introduced by TALE nuclease pair POT33_T01 within a POT33 allele
caagtgtgtgcaatagtagttctactactacaactctcaaaactcctttcatttcatccaatacttctttaggttccactcctaagccctccacattcctttcccatggaaaacgtaacaaaactttcaaagtctcttgcaaagtttctaatagtggtgaccaaaaccaaaacattgaaacgaattctgttgatcgaagaaatgttcttcttggcttaggaggtctttatggtgttgctaatgctataccattagcagcatcggctactcctataccatcccctgatctcaaaacttgtggtagagccaccatatcggatggtccactagtaccctatacttgttgccccctcctatgccaactaactttgacaccattccatattacaagttcccttctatgactaaactccgtatccgtcccctgctcatgctgttgatgaggagtatattgctaagtataatttggccataagtcgaatgaaagatcttgataagacagaccctttaaaccctctt

SEQ ID NO: 1320 - DNA, 520 bp, Artificial
  Mutation introduced by TALE nuclease pair POT33_T01 within a POT33 allele
caagtgtgtgcaatagtagttctactactacaactctcaaaactcctttcatttcatccaatacttctttaggttccactcctaagcccttccttcctccgaatcggaaacaaagactaacttcaaaaagtctcttgcaaagtttctaatagtggtgaccaaaaccaaaacattgaaacgaattctgttgatcgaagaaatgttcttcttggcttaggaggtctttatggtgttgctaatgctataccattagcagcatcggctactcctataccatcccctgatctcaaaacttgtggtagagccaccatatcggatggtccactagtaccctatacttgttgccccactcctatgccaactaactttgacaccattccatattacaagttcccttctatgactaaactccgtatccgtccccctgctcatgctgttgatgagggagtatattgctaagtataatttggccataagtcgaatgaaagatcttgataagacagaccctttaaaccctctt

SEQ ID NO: 1321 - DNA, 512 bp, Artificial
  Mutation introduced by TALE nuclease pair POT33_T01 within a POT33 allele
caagtgtgtgcaatagtagttctactactacaactctcaaaactcctttcatttcatccaatacttctttaggttccactcctaagccctctttcctccaggaaaacgtaacaaaactttcaaagtctcttgcaaagtttctaatagtggtgaccaaaaccaaaacattgaaacgaattctgttgatcgaagaaatgttcttcttggcttaggaggtctttatggtgttgctaatgctataccattagcagcatcggctactcctataccatcccctgatctcaaaacttgtggtagagccaccatatcggatggtccactagtaccctatacttgttgccccctcctatgccaactaactttgacaccattccatattacaagttcccttctatgactaaactccgtatccgtcccctgctcatgctgttgatgaggagtatattgctaagtataatttggccataagtcgaatgaaagatcttgataagacagaccctttaaaccctctt

SEQ ID NO: 1322 - DNA, 502 bp, Artificial
  Mutation introduced by TALE nuclease pair POT33_T01 within a POT33 allele
caagtgtgtgcaatagtagttctactactacaactctcaaaactcctttcatttcatccaatacttctttaggttccatctcctaagcttttcctccatggaaaacgtaacaaaactttcaaagtctcttgcaaagtttctaatagtggtgaccaaaaccaaaacattgaaacgaattctgttgatcgaagaaatgttcttcttggcttaggaggtctttatggtgttgctaatgctataccattagcagcatcggctactcctataccatcccctgatctcaaaacttgtggtagagccaccatatcggatggtccactagtaccctatacttgttgccccccctcctatgccaactaactttgacaccattccatattacaagttcccttctcatgactaaactccgtatccgtccccctgctcatgctgttgatgaggagtatattgctaagtataatttggccataagtcgaatgaaagatcttgataagacagaccc

SEQ ID NO: 1323 - DNA, 512 bp, Artificial
  Mutation introduced by TALE nuclease pair POT33_T01 within a POT33 allele
caagtgtgtgcaatagtagttctactactacaactctcaaaactcctttcatttcatccaatacttctttaggttccactcctaagccctctcctccatggaaaacgtaacaaaactttcaaagtctcttgcaaagtttctaatagtggtgaccaaaaccaaaacattgaaacgaattctgttgatcgaagaaatgttcttcttggcttaggaggtctttatggtgttgctaatgctataccattagcagcatcggctactcctataccatcccctgatctcaaaacttgtggtagagccaccatatcggatggtccactagtaccctatacttgttgcccccctcctatgccaactaactttgacaccattccatattacaagttcccttctatgactaaactccgtatccgtcccctgctcatgctgttgatgaggagtatattgctaagtataatttggccataagtcgaatgaaagatcttgataagacagaccctttaaaccctctt

SEQ ID NO: 1324 - DNA, 515 bp, Artificial
  Mutation introduced by TALE nuclease pair POT33_T01 within a POT33 allele
caagtgtgtgcaatagtagttctactactacaactctcaaaactcctttcatttcatccaatacttctttaggttccactcctaagccctcttttcctccatggaaaacgtaacaaaactttcaaagtctcttgcaaagtttctaatagtggtgaccaaaaccaaaacattgaaacgaattctgttgatcgaagaaatgttcttcttggcttaggaggtctttatggtgttgctaatgctataccattagcagcatcggctactcctataccatcccctgatctcaaaacttgtggtagagccaccatatcggatggtccactagtaccctatacttgttgccccctcctatgccaactaactttgacaccattccatattacaagttacccttctatgactaaactccgtatccgtcccctgctcatgctgttgatgaggagtatattgctaagtataatttggccataagtcgaatgaaagatcttgataagacagaccctttaaaccctctt

SEQ ID NO: 1325 - DNA, 512 bp, Artificial
  Mutation introduced by TALE nuclease pair POT33_T01 within a POT33 allele
caagtgtgtgcaatagtagttctactactacaactctcaaaactcctttcatttcatccaatacttctttaggttccactcctaagccctctctccatggaaaacgtaacaaaactttcaaagtctcttgcaaagtttctaatagtggtgaccaaaaccaaaacattgaaacgaattctgttgatcgaagaaatgttcttcttggcttaggaggtctttatggtgttgctaatgctataccattagcagcatcggctactcctataccatcccctgcatctcaaaacattgtggtagagccaccatatcggatggtccactagtaccctatacttgttgccccctcctatgccaactaactttgacaccattccatattacaagttcccttctatgactaaactccgtatccgtcccctgctcatgctgttgatgaggagtatattgctaagtataatttggccataagtcgaatgaaagatcttgataagacagaccctttaaaccctctt

SEQ ID NO: 1326 - DNA, 515 bp, Artificial
  Mutation introduced by TALE nuclease pair POT33_T01 within a POT33 allele
caagtgtgtgcaatagtagttctactactacaactctcaaaactcctttcatttcatccaatacttctttaggttccactcctaagccccctccatggaaacgtgaaacaaaacattctaagtcatcttgcaaagtttcatgtaatagtaggtggaccaaaaccaaaacattgaaacgaattctgttgatcgaagaaatgttcttcttggcttaggaggtctttatggtgttgctaatgctataccattagcagcatcggctactcctataccatcccctgatctcaaaacttgtggtagagccaccatatcggatggtccactagtaccctatacttgttgccccctcctatgccaactaactttgacaccattccatattacaagttcccttctatgactaaactccgtatccgtcccctgctcatgctgttgatgaggagtatattgctaagtataatttggccataagtcgaatgaaagatcttgataagacagaccctttaaaccctctt

SEQ ID NO: 1327 - DNA, 511 bp, Artificial
  Mutation introduced by TALE nuclease pair POT33_T01 within a POT33 allele
caagtgtgtgcaatagtagttctactactacaactctcaaaactcctttcatttcatccaatacttctttaggttccactcctaagcccttttcctccatggaaaacgtaacaaaactttcaaagtctcttgcaaagtttctaatagtggtgaccaaaaccaaaacattgaaacgaattctgttgatcgaagaaatgttcttctggcttaggaggtctttatggtgttgctaatgctataccattagcagcatcggctactcctataccatcccctgatctcaaaacttgtggtagagccaccatatcggatggtccactagtaccctatacttgttgccccctcctatgccaactaactttgacaccattccatattacaagttcccttctatgactaaactccgtatccgtcccctgctcatgctgttgatgaggagtatattgctaagtataatttggccataagtcgaatgaaagatcttgataagacagaccctttaaaccctctt

SEQ ID NO: 1328 - DNA, 514 bp, Artificial
  Mutation introduced by TALE nuclease pair POT33_T01 within a POT33 allele
caagtgtgtgcaatagtagttctactactacaactctcaaaactcctttcatttcatccaatacttctttaggttccactcctaagccctctcttcctccatggaaaacgtaacaaaactttcaaagtctcttgcaaagtttctaatagtggtgaccaaaaccaaaacattgaaacgaattctgttgatcgaagaaatgttcttcttggcttaggaggtctttatggtgttgctaatgctataccattagcagcatcggctactcctataccatcccctgatctcaaaacttgtggtagagccaccatatcggatggtccactagtaccctatacttgttgccccctcctatgccaactaactttgacaccattccatattacaagttcccttctatgactaaactccgtatccgtcccctgctcatgctgttgatgaggagtatattgctaagtataatttggccataagtcgaatgaaagatcttgataagacagacactttaaaccctctt

SEQ ID NO: 1329 - DNA, 426 bp, Artificial
  Mutation introduced by TALE nuclease pair POT33_T01 within a POT33 allele
caagtgtgtgcaatagtagttctactactacaactctcaaaactcctttcatttcatccaatacttctttaggttccactcctaagcctggaaaacgtaacaaaactttcaaagtctcttgcaaagtttctaatagtggtgaccaaaaccaaaacattgaaacgaattctgttgatcgaagaaatgttcttcttggcttaggaggtctttatggtgttgctaatgctataccattagcagcatcggctactcctataccatcccctgatctcaaaacttgtggtagagccaccatatcggatggtccactagtaccctatacttgttgcccccctcctatgccaactaactttgacaccattccatattacaagttcccttctatgactaaactccgtatccgtcccctgctccatgctgttgatg

SEQ ID NO: 1330 - DNA, 511 bp, Artificial
  Mutation introduced by TALE nuclease pair POT33_T01 within a POT33 allele
caagtgtgtgcaatagtagttctactactacaactctcaaaactcctttcatttcatccaatacttctttaggttccactcctaagcccttcctccatggaaaacgtaacaaaactttcaaagtctcttgcaaagtttctaatagtggtgaccaaaaccaaaacattgaaacgaattctgttgatcgaagaaatgttcttcttggcttaggaggtctttatggtgttgctaatgctataccattagcagcatcggctactcctataccatcccctgatctcaaaacttgtggtagagccaccatatcggatggtccactagtaccctataccttgttgccccctcctatgccaactaactttgacaccattccatattacaagttcccttctatgactaaactccgtatccgtcccctgctcatgctgttgatgaggagtatattgctaagtataatttggccataagtcgaatgaaagatcttgataagacagaccctttaaaccctctt

SEQ ID NO: 1331 - DNA, 509 bp, Artificial
  Mutation introduced by TALE nuclease pair POT33_T01 within a POT33 allele
caagtgtgtgcaatagtagttctactactacaactctcaaaactcctttcatttcatccaatacttctttaggttccactcctaagccctcctccatggaaaacgtaacaaaactttcaaagtctcttgcaaagtttctaatagtggtgaccaaaaccaaaacattgaaacgaattctgttgatcgaagaaatgttcttcttggcttaggaggtctttatggtgttgctaatgctataccattagcagcatcggctactcctataccatcccctgatctcaaaacttgtggtagagccaccatatcggatggtccactagtaccctatacttgttgccccctcctatgccaactaactttgacaccattccatattacaagttcccttctatgactaaactccgtatccgtcccctgctcatgctgttgatgaggagtatattgctaagtataatttggccataagtcgaatgaaagatcttgataagacagaccctttaaaccctctt

SEQ ID NO: 1332 - DNA, 510 bp, Artificial
  Mutation introduced by TALE nuclease pair POT33_T01 within a POT33 allele
caagtgtgtgcaatagtagttctactactacaactctcaaaactcctttcatttcatccaatacttctttaggttccactcctaactttcctccatggaaaacgtaacaaaactttcaaagtctcttgcaaagtttctaatagtggtgaccaaaaccaaaacattgaaacgaattctgttgatcgaagaaatgttcttcttggcttaggaggtctttatggtgttgctaatgctataccattagcagcatcggctactcctataccatcccctgatctcaaaacttgtggtagagccaccatatcggatggtccactagtaccctatacttgttgcccccctcctatgccaactaactttgacaccattccatattacaagttcccttctatgactaaactccgtatccgtccccctgctcatgctgttgatgaggagtatattgctaagtataatttggccataagtcgaatgaaagatcttgataagacagaccctttaaaccctctt

SEQ ID NO: 1333 - DNA, 484 bp, Artificial
  Mutation introduced by TALE nuclease pair POT33_T01 within a POT33 allele
caagtgtgtgcaatagtagttctactactacaactctcaaaactcctttcatttcatccaatacttctttaggttccactcctaagccctctcaagtctcttgcaaagtttctaatagtggtgaccaaaaccaaaacattgaaacgaattctgttgatcgaagaaatgttcttcttggcttaggaggtctttatggtgttgctaatgctataccattagcagcatcggctactcctataccatcccctgatctcaaaacttgtggtagagccaccatatcggatggtccactagtaccctatacttgttgcccccctcctatgccaactaactttgacaccattccatattacaagttcccttctatgactaaactccgtatccgtcccctgctcatgctgttgatgaggagtatattgctaagtataatttggccataagtcgaatgaaagatcttgataagacagaccctttaaaccctctt

SEQ ID NO: 1334 - DNA, 555 bp, Artificial
  Mutation introduced by TALE nuclease pair POT33_T01 within a POT33 allele
caagtgtgtgcaatagtagttctactactacaactctcaaaactcctttcatttcatccaatacttctttaggttccactcctaagcccctcctgaaccgatgaaacgtaaaaccaaattcttaacgtcaatcgtttgccaatcgttttgccaaatgttttaatcagttaatggagttggtgacccaaaaaacccaaaaaccatttgaaacgaattctgttgatcgaagaaatgttcttcttggcttaggaggtctttatggtgttgctaatgctataccattagcagcatcggctactcctataccatcccctgatctcaaaacttgtggtagagccaccatatcggatggtccactagtaccctatacttgttgcccccctcctatgccaactaactttgacaccattcccatattacaagttccctttctatgactaaactccgtatccgtcccctgctcatgctgttgatgagggagtatattgcctaagtataatttggccataagtcgaatgaaaggatcttgataagacagaccctttaaaccctctt

SEQ ID NO: 1335 - DNA, 511 bp, Artificial
  Mutation introduced by TALE nuclease pair POT33_T01 within a POT33 allele
caagtgtgtgcaatagtagttctactactacaactctcaaaactcctttcatttcatccaatacttctttaggttccactcctaagccctccatggaaaacgtaacaaaacattcaaagtcatcttgcaaagtttcattaatagtaggtgaccaaaaccaaaacattgaaacgaattctgttgatcgaagaaatgttcttcttggcttaggaggtctttatggtgttgctaatgctataccattagcagcatcggctactcctataccatccctgatctcaaaacttgtggtagagccaccatatcggatggtccactagtaccctatacttgttgcccccctcctatgccaactaactttgacaccattccatattacaagttcccttctatgactaaactccgtatccgtccccctgctcatgctgttgatgaggagtatattgctaagtataatttggccataagtcgaatgaaagatcttgataagacagaccctttaaaccctctt

SEQ ID NO: 1336 - DNA, 506 bp, Artificial
  Mutation introduced by TALE nuclease pair POT33_T01 within a POT33 allele
caagtgtgtgcaatagtagttctactactacaactctcaaaactcctttcatttcatccaatacttctttaggttccactcctaagccctctttcctccatggaaaacgtaacaaaactttcaaagtctcttgcaaagtttctaatagtggtgaccaaaaccaaaacattgaaacgaattctgttgatcgaagaaatgttcttcttggcttaggaggtctttatggtgttgctaatgctataccattagcagcatcggctactcctataccatcccctgatctcaaaacttgtggtagagccaccatatcggatggtccactagtaccctatacttgttgccccctcctatgccaactaactttgacaccattccatattacaagttcccttctatgactaaactccgtatccgtcccctgctcatgctgttgatgaggagtatattgctaagtataatttggccataagtcgaatgaaagatcttgataagacagaccctttaaa

SEQ ID NO: 1337 - DNA, 511 bp, Artificial
  Mutation introduced by TALE nuclease pair POT33_T01 within a POT33 allele
caagtgtgtgcaatagtagttctactactacaactctcaaaactcctttcatttcatccaatacttctttaggttccactcctaagccctcttcctccatggaaaacgtaacaaaactttcaaagtctcttgcaaagtttctaatagtggtgaccaaaaccaaaacattgaaacgaattctgttgatcgaagaaatgttcttcttggcttaggaggtctttatggtgttgctaatgctataccattagcagcatcggctactcctataccatcccctgatctcaaaacttgtggtagagccaccatatcggatggtccactagtaccctatacttgttgccccctcctatgccaactaactttgacaccatccatattacaagttcccttctatgactaaactccgtatccgtcccctgctcatgctgttgatgaggagtatattgctaagtataatttggccataagtcgaatgaaagatcttgataagacagaccctttaaaccctctt

SEQ ID NO: 1338 - DNA, 510 bp, Artificial
  Mutation introduced by TALE nuclease pair POT33_T01 within a POT33 allele
caagtgtgtgcaatagtagttctactactacaactctcaaaactcctttcatttcatccaatacttctttaggttccactcctaagccttcctccatggaaaacgtaacaaaactttcaaagtctcttgcaaagtttctaatagtggtgaccaaaaccaaaacattgaaacgaattctgttgatcgaagaaatgttcttcttggcttaggaggtctttatggtgttgctaatgctataccattagcagcatcggctactcctataccatcccctgatctcaaaacttgtggtagagccaccatatcggatggtccactagtaccctatacttgttgccccctcctatgccaactaactttgacaccattccatattacaagttcccttctatgactaaactccgtatccgtcccctgctcatgctgttgatgaggagtatattgctaagtataattttggccataagtcgaatgaaagatcttgataagacagaccctttaaaccctctt

SEQ ID NO: 1339 - DNA, 512 bp, Artificial
  Mutation introduced by TALE nuclease pair POT33_T01 within a POT33 allele
caagtgtgtgcaatagtagttctactactacaactctcaaaactcctttcatttcatccaatacttctttaggttccactcctaagccctttcctccatggaaaacgtaacaaaactttcaaagtctcttgcaaaagtttctaatagtggtgaccaaaaccaaaacattgaaacgaattctgttgatcgaagaaatgttcttcttggcttaggaggtctttatggtgttgctaatgctataccattagcagcatcggctactcctataccatcccctgatctcaaaacttgtggtagagccaccatatcggatggtccactagtaccctatacttgttgccccctcctatgccaactaactttgacaccattccatattacaagttcccttctatgactaaactccgtatccgtcccctgctcatgctgttgatgaggagtatattgctaagtataatttggccataagtcgaatgaaagatcttgataagacagaccctttaaaccctctt

SEQ ID NO: 1340 - DNA, 511 bp, Artificial
  Mutation introduced by TALE nuclease pair POT33_T01 within a POT33 allele
caagtgtgtgcaatagtagttctactactacaactctcaaaactcctttcatttcatccaatacttctttaggttccactcctaagccctctccatggaaaacgtaacaaaacttcaaagtctcttgcaaaagtttctaatagtggtgaccaaaaccaaaacattgaaacgaattctgttgatcgaagaaatgttcttcttggcttaggaggtctttatggtgttgctaatgctataccattagcagcatcggctactcctataccatcccctgatctcaaaacttgtggtagagccaccatatcggatggtccactagtaccctatacttgttgcccccctcctatgccaactaactttgacaccattccatattacaagttcccttctatgactaaactccgtatccgtccccctgctcatgctgttgatgagggagtatattgctaagtataatttggccataagtcgaatgaaagatcttgataagacagaccctttaaaccctctt

SEQ ID NO: 1341 - DNA, 509 bp, Artificial
  Mutation introduced by TALE nuclease pair POT33_T01 within a POT33 allele
caagtgtgtgcaatagtagttctactactacaactctcaaaactcctttcatttcatccaatacttctttaggttccactcctaagcccttcctccatggaaaacgtaacaaaactttcaaagtctcttgcaaagtttctaatagtggtgaccaaaaccaaaacattgaaacgaattctgttgatcgaagaaatgttcttcttggcttaggaggtctttatggtgttgctaatgctataccattagcagcatcggctactcctataccatcccctgatctcaaaacttgtggtagagccaccatatcggatggtccactagtaccctatacttgttgccccctcctatgccaactaactttgacaccattccatattacaagttcccttctatgactaaactccgatccgtcccctgctcatgctgttgatgaggagtatattgctaagtataatttggccataagtcgaatgaaagatcttgataagacagaccctttaaaccctctt

SEQ ID NO: 1342 - DNA, 512 bp, Artificial
  Mutation introduced by TALE nuclease pair POT33_T01 within a POT33 allele
caagtgtgtgcaatagtagttctactactacaactctcaaaactcctttcatttcatccaatacttctttaggttccactcctaagtcctctcctccatggaaaacgtaacaaaactttcaaagtctcttgcaaagtttctaatagtggtgaccaaaaccaaaacattgaaacgaattctgttgatcgaagaaatgttcttcttggcttaggaggtctttatggtgttgctaatgctataccattagcagcatcggctactcctataccatcccctgatctcaaaacttgtggtagagccaccatatcggatggtccactagtaccctatacttgttgccccctcctatgccaactaactttgacaccattccatattacaagttcccttctatgactaaactccgtatccgtccccctgctcatgctgttgatgaggagtatattgctaagtataatttggccataagtcgaatgaaagatcttgataagacagaccctttaaaccctctt

SEQ ID NO: 1343 - DNA, 512 bp, Artificial
  Mutation introduced by TALE nuclease pair POT33_T01 within a POT33 allele
caagtgtgtgcaatagtagttctactactacaactctcaaaactcctttcatttcatccaatacttctttaggttccactcctaagcctctttcctccatggaaaacgtaacaaaactttcaaagtctcttgcaaagtttctaatagtggtgaccaaaaccaaaacattgaaacgaattctgttgatcgaagaaatgttcttcttggcttaggaggtctttatggtgttgctaatgctataccattagcagcatcggctactcctataccatcccctgatctcaaaacttgtggtagagccaccatatcggatggtccactagtaccctatacttgttgccccctcctatgccaactaactttgacaccattccatattacaagttcccttctatgactaaactccgtatccgtcccctgctcatgctgttgatgaggagtatattgctaagtataatttggccataagtcgaatgaaagatcttgataagacagaccctttaaaccctctt

SEQ ID NO: 1344 - DNA, 508 bp, Artificial
  Mutation introduced by TALE nuclease pair POT33_T01 within a POT33 allele
caagtgtgtgcaatagtagttctactactacaactctcaaaactcctttcatttcatccaatacttctttaggttccactcctaagccttcctccatggaaaacgtaacaaaacttcaaagtctcttgcaaagtttctaatagtggtgaccaaaaccaaaacattgaaacgaattctgttgatcgaagaaatgttcttcttggcttaggaggtctttatggtgttgctaatgctataccattagcagcatcggctactcctataccatcccctgatctcaaaacttgtggtagagccaccatatcggatggtccactagtaccctatacttgttgccccctcctatgccaactaactttgacaccattccatattacaagttcccttctatgactaaactccgtatccgtcccctgctcatgctgttgatgaggagtatattgctaagtataatttggccataagtcgaatgaaagatcttgataagacagaccctttaaaccctctt

SEQ ID NO: 1345 - DNA, 517 bp, Artificial
  Mutation introduced by TALE nuclease pair POT33_T01 within a POT33 allele
caagtgtgtgcaatagtagttctactactacaactctcaaaactcctttcatttcatccaatacttctttaggttccactcctaagccctctcttcctccatggaaaacgtaacaaaactttcaaagtctcttgcaaagtttctaatagtggtgaccaaaaccaaaacattgaaacgaattctgttgatcgaagaaatgttcttcttggcttaggaggtctttatggtgttgctaatgctataccattagcagcatcggctactcctataccatcccctgatctcaaaacttgtggtagagccaccatatcggatggtccactagtaccctatacttgttgcccccctcctatgccaactaactttgacaccattccatattacaagttcccttctatgactaaactccgtatccgtccccctgctcatgctgttgatgagggagtatattgctaagtataatttggccataagtcgaatgaaagatcttgataagacagaccctttaaaccctctt

SEQ ID NO: 1346 - DNA, 499 bp, Artificial
  Mutation introduced by TALE nuclease pair POT33_T01 within a POT33 allele
caagtgtgtgcaatagtagttctactactacaactctcaaaactcctttcatttcatccaatacttctttaggttccactcctaagccctttcctccatggaaaacgtaacaaaactttcaaagtctcttgcaaagtttctaatagtggtgaccaaaaccaaaacattgaaacgaattctgttgatcgaagaaatgttcttcttggcttaggaggtctttatggtgttgctaatgctataccattagcagcatcggctactcctataccatcccctgatctcaaaacttgtggtagagccaccatatcggatggtccactagtaccctatacttgttgccccctcctatgccaactaactttgacaccattccatattacaagttcccttctatgactaaactccgtatccgtcccctgctcatgctgttgatgaggagtatattgctaagtataatttggccataagtcgaatgaaagatcttgataagacagacctt

SEQ ID NO: 1347 - DNA, 478 bp, Artificial
  Mutation introduced by TALE nuclease pair POT33_T01 within a POT33 allele
caagtgtgtgcaatagtagttctactactacaactctcaaaactcctttcatttcatccaatactggaaaacgtaacaaaactttcaaagtctcttgcaaagtttctaatagtggtgaccaaaaccaaaacattgaaacgaattctgttgatcgaagaaatgttcttcttggcttaggaggtctttatggtgttgctaatgctataccattagcagcatcggctactcctataccatcccctgatctcaaaacttgtggtagagccaccatatcggatggtccactagtaccctatacttgttgcccccctcctatgccaactaactttgacaccattccatattacaagttcccttctatgactaaactccgtatccgtcccctgctcatgctgttgatgaggagtatattgctaagtataatttggccataagtcgaatgaaagatcttgataagacagaccctttaaaccctctt

SEQ ID NO: 1348 - DNA, 522 bp, Artificial
  Mutation introduced by TALE nuclease pair POT33_T01 within a POT33 allele
caagtgtgtgcaatagtagttctactactacaactctcaaaactcctttcatttcatccaatacttctttaggttccactcctaagcccttttccttccatcggaaaatcgtaaacaaaacttactaaagtctcttgcaaaagttttctaatagtggtgaccaaaaccaaaacattgaaacgaattctgttgatcgaagaaatgttcttcttggcttaggaggtctttatggtgttgctaatgactataccattagcagcatcggctactcctataccatcccctgatctcaaaacttgtggtagagccaccatatcggatggtccactagtaccctatacttgttgcccccctcctatgccaactaactttgacaccattccatattacaagttcccttctatgactaaactccgtatccgtccccctgctcatgctgttgatgaggagtatattgctaagtataatttggccataagtcgaatgaaagatcttgataagacagaccctttaaaccctctt

SEQ ID NO: 1349 - DNA, 508 bp, Artificial
  Mutation introduced by TALE nuclease pair POT33_T01 within a POT33 allele
caagtgtgtgcaatagtagttctactactacaactctcaaaactcctttcatttcatccaatacttctttaggttccactcctaagttcctccatggaaaacgtaacaaaacttcaaagtctcttgcaaagtttctaatagtggtgaccaaaaccaaaacattgaaacgaattctgttgatcgaagaaatgttcttcttggcttaggaggtctttatggtgttgctaatgctataccattagcagcatcggctactcctataccatcccctgatctcaaaacttgtggtagagccaccatatcggatggtccactagtaccctatacttgttgcccccctcctatgccaactaactttgacaccattccatattacaagttcccttctatgactaaactccgtatccgtcccctgctcatgctattgatgagggagtatattgctaagtataatttggccataagtcgaatgaaagatcttgataagacagaccctttaaaccctctt

SEQ ID NO: 1350 - DNA, 513 bp, Artificial
  Mutation introduced by TALE nuclease pair POT33_T01 within a POT33 allele
caagtgtgtgcaatagtagttctactactacaactctcaaaactcctttcatttcatccaatacttctttaggttccactcctaagccctcttcctccatggaaaacgtaacaaaactttcaaagtctcttgcaaaagtttctaatagtggtgaccaaaaccaaaacattgaaacgaattctgttgatcgaagaaatgttcttcttggcttaggaggtctttatggtgttgctaatgctataccattagcagcatcggctactcctataccatcccctgatctcaaaacttgtggtagagccaccatatcggatggtccactagtaccctatacttgttgccccctcctatgccaactaactttgacaccattccatattacaagttcccttctatgactaaactccgtatccgtcccctgctcatgctgttgatgaggagtatattgctaagtataatttggccataagtcgaatgaaagatcttgataagacagaccctttaaaccctctt

SEQ ID NO: 1351 - DNA, 513 bp, Artificial
  Mutation introduced by TALE nuclease pair POT33_T01 within a POT33 allele
caagtgtgtgcaatagtagttctactactacaactctcaaaactcctttcatttcatccaatacttctttaggttccactcctaagccttcctccatggaaaacgtaacaaaactttcaaagtctcttgcaaaagtttctaatagtggtgaccaaaaccaaaacattgaaacgaattctgttgatcgaagaaatgttcttcttggcttaggaggtctttatggtgttgctaatgctataccattagcagcatcggctactcctataccatcccctgatctcaaaacttgtggtagagccaccatatcggatggtccactagtaccctatacttgttgccccctcctatgccaactaacttttgacaccattccatattacaagttcccttctatgactaaactccgtatccgtcccctgctcatgctgttgatgaggagtatattgctaagtataaattttggccataagtcgaatgaaagatcttgataagacagaccctttaaaccctctt

SEQ ID NO: 1352 - DNA, 508 bp, Artificial
  Mutation introduced by TALE nuclease pair POT33_T01 within a POT33 allele
caagtgtgtgcaatagtagttctactactacaactctcaaaactcctttcatttcatccaatacttctttaggttccactcctacttttcctccatggaaaacgtaacaaaactttcaaagtctcttgcaaagtttctaatagtggtgaccaaaaccaaaacattgaaacgaattctgttgatcgaagaaatgttcttcttggcttaggaggtctttatggtgttgctaatgctataccattagcagcatcggctactcctataccatcccctgatctcaaaacttgtggtagagccaccatatcggatggtccactagtaccctatacttgttgccccctcctatgccaactaactttgacaccattccatattacaagttcccttctatgactaaactccgtatccgtcccctgctcatgctgttgatgaggagtatattgctaagtataatttggccataagtcgaatgaaagatcttgataagacagaccctttaaaccctctt

SEQ ID NO: 1353 - DNA, 513 bp, Artificial
  Mutation introduced by TALE nuclease pair POT33_T01 within a POT33 allele
caagtgtgtgcaatagtagttctactactacaactctcaaaactcctttcatttcatccaatacttctttaggttccactcctaagccctctcttcctccatggaaaacgtaacaaaactttcaaagtctcttgcaaagtttctaatagtggtgaccaaaaccaaaacattgaaacgaattctgttgatcgaagaaatgttcttcttggcttaggaggtctttatggtgttgctaatgctataccattagcagcatcggctactcctataccatcccctgatctcaaaacttgtggtagagccaccatatcggatggtccactagtaccctatacttgttgcccctcctatgccaactaactttgacaccattccatattacaagttcccttctatgactaaactccgtatccgtcccctgctcatgctgttgatgaggagtatattgctaagtataatttggccataagtcgaatgaaagatcttgataagacagaccctttaaaccctctt

SEQ ID NO: 1354 - DNA, 508 bp, Artificial
  Mutation introduced by TALE nuclease pair POT33_T01 within a POT33 allele
caagtgtgtgcaatagtagttctactactacaactctcaaaactcctttcatttcatccaatacttctttaggttccactcctaagttcctccatggaaaacgtaacaaaactttcaaagtctcttgcaaagtttctaatagtggtgaccaaaaccaaaacattgaaacgaattctgttgatcgaagaaatgttcttcttggcttaggaggtctttatggtgttgctaatgctataccattagcagcatcggctactcctataccatcccctgatctcaaaacttgtggtagagccaccatatcggatggtccactagtaccctatacttgttgcccccctcctatgccaactaactttgacaccattccatattacaagttcccttctatgactaaactccgtatccgtcccctgctcatgctattgatgaggagtatattgctaagtataatttggccataagtcgaatgaaagatcttgataagacagaccctttaaaccctctt

SEQ ID NO: 1355 - DNA, 508 bp, Artificial
  Mutation introduced by TALE nuclease pair POT33_T01 within a POT33 allele
  misc_feature (123); (145): n is a or c or t or g
caagtgtgtgcaatagtagttctactactacaactctcaaaactcctttcatttcatccaatacttctttaggttccactcctaagccttcctccatggaaaacgtaacaaaactttcaaagnctcttgcaaagtttctaatagnggtgaccaaaaccaaaacttgaaacgaattctgttgatcgaagaaatgttcttcttggcttaggaggtctttatggtgttgctaatgctataccattagcagcatcggctactcctataccatcccctgatctcaaaacttgtggtagagccaccatatcggatggtccactagtaccctatacttgttgccccctcctatgccaactaactttgacaccattccatattacaagttcccttctatgactaaactccgtatccgtcccctgctcatgctgttgatgaggagtatattgctaagtataatttggccataagtcgaatgaaagatcttgataagacagaccctttaaaccctctt

SEQ ID NO: 1356 - DNA, 509 bp, Artificial
  Mutation introduced by TALE nuclease pair POT33_T01 within a POT33 allele
caagtgtgtgcaatagtagttctactactacaactctcaaaactcctttcatttcatccaatacttctttaggttccactcctaagcccttcctccatggaaaacgtaacaaaacttcaaagtctcttgcaaagtttctaatagtggtgaccaaaaccaaaacattgaaacgaattctgttgatcgaagaaatgttcttcttggcttaggaggtctttatggtgttgctaatgctataccattagcagcatcggctactcctataccatcccctgatctcaaaacttgtggtagagccaccatatcggatggtccactagtaccctatacttgttgccccctcctatgccaactaactttgacaccattccatattacaagttcccttctatgactaaactccgtatccgtcccctgctcatgctgttgatgaggagtatattgctaagtataatttggccataagtcgaatgaaagatcttgataagacagaccctttaaaccctctt

SEQ ID NO: 1357 - DNA, 513 bp, Artificial
  Mutation introduced by TALE nuclease pair POT33_T01 within a POT33 allele
caagtgtgtgcaatagtagttctactactacaactctcaaaactcctttcatttcatccaatacttctttaggttccactcctaagtcctctcctccatggaaaacgtaacaaaactttcaaagtctcttgcaaagtttctaatagtggtgaccaaaaccaaaacattgaaacgaattctgttgatcgaagaaatgttcttcttggcttaggaggtctttatggtgttgctaatgctataccattagcagcatcggctactcctataccatcccctgatctcaaaacttgtggtagagccaccatatcggatggtccactagtaccctatacttgttgcccccctcctatgccaactaactttgacaccattccatattacaagttcccttctatgactaaactccgtatccgtccccctgctcatgctgttgatgaggagtatattgctaagtataatttggccataagtcgaatgaaagatcttgataagacagaccctttaaaccctctt

SEQ ID NO: 1358 - DNA, 500 bp, Artificial
  Mutation introduced by TALE nuclease pair POT33_T01 within a POT33 allele
caagtgtgtgcaatagtagttctactactacaactctcaaaactcctttcatttcatccaatacttctttaggttccactcctaagccctctccccatcgactacggcgtgatcgtggacaccaaggcctactccggcggctacatcctccatggaaaacgtaacaaaactttcaaagtctcttgcaaagtttctaatagtggtgaccaaaaccaaaacattgaaacgaattctgttgatcgaagaaatgttcttcttggcttaggaggtctttatggtgttgctaatgctataccattagcagcatcggctactcctataccatcccctgatctcaaaacttgtggtagagccaccatatcggatggtccactagtaccctatacttgttgccccctcctatgcaactaactttgacaccattccatattacaagttcccttctatgactaaactcgtatccgtcccctgctcatgctgttgatgaggagtatattgct

SEQ ID NO: 1359 - DNA, 510 bp, Artificial
  Mutation introduced by TALE nuclease pair POT33_T01 within a POT33 allele
caagtgtgtgcaatagtagttctactactacaactctcaaaactcctttcatttcatccaatacttctttaggttccactcctaagccctcttcctccatggaaaacgtaacaaaactttcaagtctcttgcaaagtttctaatagtggtgaccaaaaccaaaacattgaaacgaattctgttgatcgaagaaatgttcttcttggcttaggaggtctttatggtgttgctaatgctataccattagcagcatcggctactcctataccatcccctgatctcaaaacttgtggtagagccaccatatcggatggtccactagtaccctatacttgttgccccctcctatgccaactaactttgacaccattccatattacaagttcccttctatgactaaactccgtatccgtcccctgctcatgctgttgatgaggagtatattgctaagtataatttggccataagtcgaatgaagatcttgataagacagaccctttaaaccctctt

SEQ ID NO: 1360 - DNA, 516 bp, Artificial
  Mutation introduced by TALE nuclease pair POT33_T01 within a POT33 allele
caagtgtgtgcaatagtagttctactactacaactctcaaaactcctttcattcattccaatcaacttctttatggtccagtctcctaagcccttttcctccatggaaaacgtaacaaaactttcaaagtctcttgcaaagtttctaatagtggtgaccaaaaccaaaacattgaaacgaattctgttgatcgaagaaatgttcttcttggcttaggaggtctttatggtgttgctaatgcaataccattagcagcatcggctactcctataccatcccctgatctcaaaacttgtggtagagccaccatatcggatggtccactagtaccctatacttgttgccccctcctatgccaactaactttgacaccattccatattacaagttcccttctatgactaaactccgtatccgtcccctgctcatgctgttgatgaggagtatattgctaagtataatttggccataagtcgaatgaaagatcttgataagacagaccctttaaaccctctt

SEQ ID NO: 1361 - DNA, 530 bp, Artificial
  Mutation introduced by TALE nuclease pair POT33_T01 within a POT33 allele
caagtgtgtgcaatagtagttctactactacaactctcaaaactccttttcattttcatccaatacttcttttaggttccactcctaagccccttttcctccaatggaaattccgaagaaaaactttcaaaagttctcttgcaaagttttctaatagtggtgaccaaaaccaaaacattgaaacgaattctgttgatcgaagaaatgttcttcttggcttaggaggtctttatggtgttgctaatgctataccattagcagcatcggctactcctataccatccccctgatctcaaaacttgtggtagagccaccatatcggatggtccactagtaccctatacttgttgccccccctcctatgccaactaacttttgacaccattccatattacaagttcccttctatgactaaactccgtatccgtcccccctgctcatgctgttgatgaggagtatattgctaagtataattttggccataagtcgaatgaaagatcttgataagacagacccttttaaaccctctt

SEQ ID NO: 1362 - DNA, 515 bp, Artificial
  Mutation introduced by TALE nuclease pair POT33_T01 within a POT33 allele
caagtgtgtgcaatagtagttctactactacaactctcaaaactcctttcatttcatccaatacttctttaggttccactcctaagtcctctcctccatggaaaacgtaacaaaactttcaaagtctcttgcaaagtttctaatagtggtgaccaaaaccaaaacattgaaacgaattctgttgatcgaagaaatgttcttcttggcttaggaggtctttatggtgttgctaatgctataccattagcagcatcggctactcctataccatccccctgatctcaaaacttgtggtagagccaccatatcggatggtccactagtaccctatacttgttgcccccctcctatgccaactaactttgacaccattccatattacaagttcccttctatgactaaactccgtatccgtccccctgctcatgctgttgatgagggagtatattgctaagtataatttggccataagtcgaatgaaagatcttgataagacagaccctttaaaccctctt

SEQ ID NO: 1363 - DNA, 514 bp, Artificial
  Mutation introduced by TALE nuclease pair POT33_T01 within a POT33 allele
caagtgtgtgcaatagtagttctactactacaactctcaaaactcctttcatttcatccaatacttctttaggttccactcctaagccctctttcctccatggaaaacgtaacaaaactttcaaagtctcttgcaaagtttctaatagtggtgaccaaaaccaaaacattgaaacgaattctgttgatcgaagaaatgttcttcttggcttaggaggtctttatggtgttgctaatgctataccattagcagcatcggctactcctataccatcccctgatctcaaaacttgtggtagagccaccatatcggatggtccactagtaccctatacttgttgcccccctcctatgccaactaactttgacaccattccatattacaagttcccttctatgactaaactccgtatccgtcccctgctcatgctgttgatgaggagtatattgctaagtataatttggtcataagtcgaatgaaagatcttgataagacagaccctttaaaccctctt

SEQ ID NO: 1364 - DNA, 510 bp, Artificial
  Mutation introduced by TALE nuclease pair POT33_T01 within a POT33 allele
  misc_feature (124); (148): n is a or c or t or g
caagtgtgtgcaatagtagttctactactacaactctcaaaactcctttcatttcatccaatacttctttaggttccactcctaagcccttcctccatggaaaacgtaacaaaactttcaaagnctcttgcaaaagttttctaatagnggtgaccaaaaccaaaacttgaaacgaattctgttgatcgaagaaatgttcttcttggcttaggaggtcttatggtgttgctaatgctatacccattagcagcatcggctactcctataccatcccctgatctcaaaacttgtggtagagccaccatatcggatggtccactagtaccctatacttgttgccccctcctatgccaactaactttgacaccattccatattacaagttcccttctatgactaaactccgatccgtcccctgctcatgctgttgatgaggagtatattgctaagtataatttggccataagtcgaatgaaagatcttgataagacagaccctttaaaccctctt

SEQ ID NO: 1365 - DNA, 478 bp, Artificial
  Mutation introduced by TALE nuclease pair POT33_T01 within a POT33 allele
caagtgtgtgcatagtagttctactactacaactctcaaaactcctttcatttcatccaatacttctttaggttcacaaaactttcaaagtctcttgcaaagtttctaatagtggtgaccaaaaccaaaacattgaaacgaattctgttgatcgaagaaatgttcttcttggcttaggaggtctttatggtgttgctaatgctataccattagcagcatcggctactcctataccatcccctgatctcaaaacttgtggtagagccaccatatcggatggtccactagtaccctatacttgttgcccacctcctatgccaactaactttgacaccattccatattacaagttcccttctatgactaaactccgtatccgtcccctgctcatgctgttgatgaggagtatattgctaagtataatttggccataagtcgaatgaaagatcttgataagacagaccctttaaaccctctt

SEQ ID NO: 1366 - DNA, 511 bp, Artificial
  Mutation introduced by TALE nuclease pair POT33_T01 within a POT33 allele
caagtgtgtgcaatagtagttctactactacaactctcaaaactcctttcatttcatccaatacttctttaggttccactcctaagcccttttcctccatggaaaacgtaacaaaacttcaaagtctcttgcaaagtttctaatagtggtgaccaaaaccaaaacattgaaacgaattctgttgatcgaagaaatgttcttcttggcttaggaggtctttatggtgttgctaatgctataccattagcagcatcggctactcctataccatcccctgatctcaaaacttgtggtagagccaccatatcggatggtccactagtaccctatacttgttgccccctcctatgccaactaactttgacaccattccatattacaagttcccttctatgactaaactccgtatccgtcccctgctcatgctgttgatgaggagtatattgctaagtataatttggccataagtcgaatgaaagatcttgataagacagaccctttaaaccctctt

SEQ ID NO: 1367 - DNA, 401 bp, Artificial
  Mutation introduced by TALE nuclease pair POT33_T01 within a POT33 allele
  misc_feature (148): n is a or c or t or g
caagtgtgtgcaatagtagttctactactacaactctcaaaactcctttcatttcatccaatacttctttaggttccactcctaaagcccttttccttcctcggaaaacggtaacaaaacttactaaagtctcttgcaaaagttttcnaatagtggtgaccaaaaccaaaacattgaaacgaattctgttgatcgaagaaatgttcttcttggcttaggaggtctttatggtgttgctaatgctataccattagcagcatcggctactcctataccatcccctgatctcaaaacttgtggtagagccaccatatcggatggtccactagtaccctatacttgttgcccccctcctatgccaactaacttttcgacaccattccatattacaagttcccttt

SEQ ID NO: 1368 - DNA, 521 bp, Artificial
  Mutation introduced by TALE nuclease pair POT33_T01 within a POT33 allele
caagtgtgtgcaatagtagttctactactacaactctcaaaactccttttcatttcatccaatacttctttaggttccactcctaagccctccacattcctttcccatggaaaacgtaacaaaactttcaaagtctcttgcaaagtttctaatagtggtgaccaaaaccaaaacattgaaacgaattctgttgatcgaagaaatgttcttcttggcttaggaggtctttatggtgttgctaatgctataccattagcagcatcggctactcctataccatcccctgatctcaaaacttgtggtagagccaccatcatcggatggtccactagtaccctatacttgttgccccctcctatgccaactaactttgacaccattccatattacaagttcccttctatgactaaactccgtatccgtcccctgctcatgctgttgatgaggagtatattgctaagtataatttggccataagtcgaatgaaagatcttgataagacagaccctttaaaccctctt

SEQ ID NO: 1369 - DNA, 510 bp, Artificial
  Mutation introduced by TALE nuclease pair POT33_T01 within a POT33 allele
caagtgtgtgcaataggtagttctactactacaactctcaaaactcctttcatttcatccaatacttctttaggttccactcctaagccttcctccatggaaaacgtaacaaaactttcaaagtctcttgcaaagtttctaatagtggtgaccaaaaccaaaacattgaaacgaattctgttgatcgaagaaatgttcttcttggcttaggaggtctttatggtgttgctaatgctataccattagcagcatcggctactcctataccatcccctgatctcaaaacttgtggtagagccaccatatcggatggtccactagtaccctatacttgttgccccctcctatgccaactaactttgacaccattccatattacaagttcccttctatgactaaactccgtatccgtcccctgctcatgctgttgatgaggagtatattgctaagtataatttggccataagtcgaatgaaagatcttgataagacagaccctttaaaccctctt

SEQ ID NO: 1370 - DNA, 513 bp, Artificial
  Mutation introduced by TALE nuclease pair POT33_T01 within a POT33 allele
caagtgtgtgcaatagtagttctactactacaactctcaaaactcctttcatttcatccaatacttctttaggttccactcctaagcccttttcctccatggaaaacgtaacaaaacttcaaagtctcttgcaaagtttctaatagtggtgaccaaaaccaaaacattgaaacgaattctgttgatcgaagaaatgttcttcttggcttaggaggtctttatggtgttgctaatgctataccattagcagcatcggctactcctataccatcccctgatctcaaaacttgtggtagagccaccatatcggatggtccactagtaccctatacttgttgcccccctcctatgccaaactaactttgacaccattccatattacaagttcccttctatgactaaactccgtatccgtcccctgctcatgctgttgatgaggagtatattgctaagtataatttggccataagtcgaatgaaagatcttgataagacagaccctttaaaccctctt

SEQ ID NO: 1371 - DNA, 469 bp, Artificial
  Mutation introduced by TALE nuclease pair POT33_T01 within a POT33 allele
caagtgtgtgcaatagtagttctactactacaactctcaaaactcctttcatttcatccaatacttctttaggttccactccttttcctccatggaaaacgtaacaaaactttcaaagtctcttgcaaagtttctaatagtggtgaccaaaaccaaaacattgaaacgaattctgttgatcgaagaaatgttcttcttggcttaggaggtctttatggtgttgctaatgctataccattagcagcatcggctactcctataccatcccctgatctcaaaacttgtggtagagccaccatatcggatggtccactagtaccctatacttgttgcccccctcctatgccaactaactttgtacaccaacttccattattacaagttcccattcctattgacctaaactccagtatccgtcccctgctccatgctgttgatgaggagtatattgtaagtataatttggccat

SEQ ID NO: 1372 - DNA, 512 bp, Artificial
  Mutation introduced by TALE nuclease pair POT33_T01 within a POT33 allele
caagtgtgtgcaatagtagttctactactacaactctcaaaactcctttcatttcatccaatacttctttaggttccactcctaagccttttcctccatggaaaacgtaacaaaacttcaaagtctcttgcaaagtttctaatagtggtgaccaaaaccaaaacattgaaacgaattctgttgatcgaagaaatgttcttcttggcttaggaggtctttatggtgttgctaatgctataccattagcagcatcggctactcctataccatcccctgatctcaaaacttgtggtagagccaccatatcggatggtccactagtaccctatacttgttgcccccctcctatgccaactaactttgacaccattccatattacaagttcccttctatgactaaactccgtatccgtccccctgctcatgctgttgatgaggagtatattgctaagtataatttggccataagtcgaatgaaagatcttgataagacagaccctttaaaccctctt

SEQ ID NO: 1373 - DNA, 514 bp, Artificial
  Mutation introduced by TALE nuclease pair POT33_T01 within a POT33 allele
caagtgtgtgcaatagtagttctactactacaactctcaaaactcctttcatttcatccaatacttctttaggttccactcctaagcccttttcctccatggaaaacgtaacaaaacttcaaagtctcttgcaaagtttctaatagtggtgaccaaaaccaaaacattgaaacgaattctgttgatcgaagaaatgttcttcttggcttaggaggtctttatggtgttgctaatgctataccattagcagcatcggctactcctataccatcccctgatctcaaaacttgtggtagagccaccatatcggatggtccactagtaccctatacttgttgcccccctcctatgccaactaactttgacaccattccatattacaagttcccttctatgactaaactccgtatccgtccccctgctcatgctgttgatgagggagtatattgctaagtataatttggccataagtcgaatgaaagatcttgataagacagaccctttaaaccctctt

SEQ ID NO: 1374 - DNA, 515 bp, Artificial
  Mutation introduced by TALE nuclease pair POT33_T01 within a POT33 allele
caagtgtgtgcaatagtagttctactactacaactctcaaaactcctttcatttcatccaatacttctttaggttccactcctaagccctctttcctccatggaaaacgtaacaaaactttcaaagtctcttgcaaaagtttctaatagtggtgaccaaaaccaaaacattgaaacgaattctgttgatcgaagaaatgttcttcttggcttaggaggtctttatggtgttgctaatgctataccattagcagcatcggctactcctataccatcccctgatctcaaaacttgtggtagagccaccatatcggatggtccactagtaccctatacttgttgccccctcctatgccaactaactttgacaccattccatattacaagttcccttctatgactaaactccgtatccgtcccctgctcatgctgttgatgaggagtatattgctaagtataattttggccataagtcgaatgaaagatcttgataagacagaccctttaaaccctctt

SEQ ID NO: 1375 - DNA, 503 bp, Artificial
  Mutation introduced by TALE nuclease pair POT33_T01 within a POT33 allele
caagtgtgtgcaatagtagttctactactacaactctcaaaactcctttcatttcatccaatacttctttaggttccactcctaagccctccatggaaaacgtaacaaaactttcaaagtctcttgcaaagtttctaatagtggtgaccaaaaccaaaacattgaaacgaattctgttgatcgaagaaatgttcttctggcttaggaggtctttatggtgttgctaatgctataccattagcagcatcggctactcctataccatcccctgatctcaaaacttgtggtagagccaccatatcggatggtccactagtaccctatacttgttgccccctcctatgccaactaactttgacaccattccatattacaagttcccttctatgactaaactccgtatccgtcccctgctcatgctgttgatgaggagtatattgctaagtataatttggccataagcgatgaatgaacttgataagacagaccctttaaaccctctt

SEQ ID NO: 1376 - DNA, 512 bp, Artificial
  Mutation introduced by TALE nuclease pair POT33_T01 within a POT33 allele
caagtgtgtgcaatagtagttctactactacaactctcaaaactcctttcatttcatccaatacttctttaggttccactcctaagcccttttcctccatggaaaacgtaacaaaactttcaaagtctcttgcaaagtttctaatagtggtgaccaaaaccaaaacattgaaacgaattctgttgatcgaagaaatgttcttcttggcttaggaggtctttatggtgttgctaatgctataccattagcagcatcggctactcctataccatcccctgatctcaaaacttggtggtagcgcaccatatcggatggtccactagtaccctatacttgttgccccctcctatgccaactaactttgacaccattccatattacaagttcccttctatgactaaactccgtatccgtcccctgctcatgctgttgatgaggagtatattgctaagtataatttggccataagtcgaatgaaagatcttgataagacagaccctttaaaccctctt

SEQ ID NO: 1377 - DNA, 506 bp, Artificial
  Mutation introduced by TALE nuclease pair POT33_T01 within a POT33 allele
caagtgtgtgcaatagtagttctactactacaactctcaaaactcctttcatttcatccaatacttctttaggttccactcctaagccctctatggaaaacgtaacaaaactttcaaagtctcttgcaaagtttctaatagtggtgaccaaaaccaaaacattgaaacgaattctgttgatcgaagaaatgttcttcttggcttaggaggtctttatggtgttgctaatgctataccattagcagcatcggctactcctataccatcccctgatctcaaaacttgtggtagagccaccatatcggatggtccactagtaccctatacttgttgccccctcctatgccaactaactttgacaccattccatattacaagttcccttctatgactaaactccgtatccgtcccctgctcatgctgttgatgaggagtatattgctaagtataatttggccataagtcgaatgaaagatcttgataagacagaccctttaaaccctctt

SEQ ID NO: 1378 - DNA, 441 bp, Artificial
  Mutation introduced by TALE nuclease pair POT33_T01 within a POT33 allele
  misc_feature (151); (163); (175); (225); (239): n is a or c or t or g
caagtgtgtgcaatagtagttctactactacaactctcaaaactcctttcatttcatccaatacttctttaggttccactcctaagcccttttttccctcctgggaaaaaaggtaaccaaaacttttccaaagctcttgcaaaagttttcnaaattagggtgnccaaaaccaaanttgaaacgaattctgttgatcgaagaaatgttcttcttggcttaggaggncttatggtgttgcnaatgctatacccattagcagcatcggctactcctataccatcccctgatctcaaaacttgtggtagagccaccatatcggatggtccactagtaccctatacttgttgcccccctccctatgccaactaacttttgacaccattccatattacaagttcccttctatgactaaactccgtatccgtccccctgctcatgctg

SEQ ID NO: 1379 - DNA, 483 bp, Artificial
  Mutation introduced by TALE nuclease pair POT33_T01 within a POT33 allele
caagtgtgtgcaatagtagttctactactacaactctcaaaactcctttcatttcatccaatacttctttaggttccactcctaagcccatggaaaacgtaacaaaactttcaaagtctcttgcaaagtttctaatagtggtgaccaaaaccaaaacattgaaacgaattctgttgatcgaagaaatgttcttcttggcttaggaggtctttatggtgttgctaatgctataccattagcagcatcggctactcctataccatcccctgatctcaaaacttgtggtagagccaccatatcggatggtccactagtaccctatacttgttgcccccctcctatgccaactaactttgacaccattccatattacaagttcccttctatgactaaactccgtatccgtcccctgctcatgctgttgatgaggagtatattgctaagtataatttggccataagtcgaatgaaagatcttgataag

SEQ ID NO: 1380 - DNA, 514 bp, Artificial
  Mutation introduced by TALE nuclease pair POT33_T01 within a POT33 allele
  misc_feature (127); (150): n is a or c or t or g
caagtgtgtgcaatagtagttctactactacaactctcaaaactcctttcatttcatccaatacttctttaggttccactcctaagccctttttcctccatggaaaacgtaacaaaactttcaaagnctcttgcaaaagtttctaatagnggtgaccaaaaccaaaacttgaaacgaattctgttgatcgaagaaatgttcttcttggcttaggaggtctttatggtgttgctaatgctataccattagcagcatcggctactcctataccatcccctgatctcaaaacttgtggtagagccaccatatcggatggtccactagtaccctatacttgttgccccctcctatgccaactaactttgacaccattccatattacaagttcccttctatgactaaactccgtatccgtccccctgctcatgctgttgatgaggagtatattgctaagtataatttggccataagtcgaatgaaagatcttgataagacagaccctttaaaccctctt

SEQ ID NO: 1381 - DNA, 517 bp, Artificial
  Mutation introduced by TALE nuclease pair POT33_T01 within a POT33 allele
  misc_feature (445); (492): n is a or c or t or g
catgtgtgcaatagtagttctactactacaactctcaaaactcctttcatttcatccaatacttctttaggttccactcctaagcccctttttcctccatggaaaacgtaacaaaactttcaaagtctcttgcaaagtttctaatagtggtgaccaaaaccaaaacattgaaacgaattctgttgatcgaagaaatgttcttcttggcttaggaggtctttatggtgttgctaatgctataccattagcagcatcggctactcctataccatcccctgatctcaaaacttgtggtagagccaccatatcggatggtccactagtaccctatacttgttgcccccctcctatgccaactaactttgacaccattccatattacaagttcccttctaattgactaaactaccgtctcgtccctcgctccatgctgttgatgaggagnatattgcttaagtataatttggccataagtcgaatgaaagatcttgntaagacagaccctttaaaccctctt

SEQ ID NO: 1382 - DNA, 511 bp, Artificial
  Mutation introduced by TALE nuclease pair POT33_T01 within a POT33 allele
caagtgtgtgcaatagtagttctactactacaactctcaaaactcctttcatttcatccaatacttctttaggttccactcctaagcccttcctccatggaaaacgtaacaaaactttcaaagtctcttgcaaaagtttctaatagtggtgaccaaaaccaaaacattgaaacgaattctgttgatcgaagaaatgttcttcttggcttaggaggtctttatggtgttgctaatgctataccattagcagcatcggctactcctataccatcccctgatctcaaaacttgtggtagagccaccatatcggatggtccactagtaccctatacttgttgccccctcctatgccaactaactttgacaccattccatattacaagttcccttctatgactaaactccgtatccgtcccctgctcatgctgttgatgaggagtatattgctaagtataatttggccataagtcgaatgaaagatcttgataagacagaccctttaaaccctctt

SEQ ID NO: 1383 - DNA, 514 bp, Artificial
  Mutation introduced by TALE nuclease pair POT33_T01 within a POT33 allele
caagtgtgtgcaatagtagttctactactacaactctcaaaactcctttcatttcatccaatacttctttaggttccactcctaagctctcttcctccatggaaaacgtaacaaaactttcaaagtctcttgcaaagtttctaatagtggtgaccaaaaccaaaacattgaaacgaattctgttgatcgaagaaatgttcttcttggcttaggaggtctttatggtgttgctaatgctataccattagcagcatcggctactcctataccatcccctgatctcaaaacttgtggtagagccaccatatcggatggtccactagtaccctatacttgttgcccccctcctatgccaactaactttgacaccattcctattacaagttcccttctatgactaaactccgtatccgtccccctgctcatgctgttgatgagggagtatattgctaagtataatttggccataagtcgaatgaaagatcttgataagacagaccctttaaaccctctt

SEQ ID NO: 1384 - DNA, 508 bp, Artificial
  Mutation introduced by TALE nuclease pair POT33_T01 within a POT33 allele
caagtgtgtgcaatagtagttctactactacaactctcaaaactcctttcatttcatccaatacttctttaggttccactcctaactttcctccatggaaaacgtaacaaaactttcaaagtctcttgcaaagtttctaatagtggtgaccaaaaccaaaacattgaaacgaattctgttgatcgaagaaatgttcttcttggcttaggaggtctttatggtgttgctaatgctataccattagcagcatcggctactcctataccatcccctgatctcaaaacttgtggtagagccaccatatcggatggtccactagtaccctatacttgttgccccctcctatgccaactaactttgacaccattccatattacaagttcccttctatgactaaactccgtatccgtcccctgctcatgctgttgatgaggagtatattgctaagtataatttggccataagtcgaatgaaagatcttgataagacagaccctttaaaccctctt

SEQ ID NO: 1385 - DNA, 512 bp, Artificial
  Mutation introduced by TALE nuclease pair POT33_T01 within a POT33 allele
caagtgtgtgcaatagtagttctactactacaactctcaaaactcctttcatttcatccaatacttctttaggttccactcctaagccctctttcctccaggaaaacgtaacaaaactttcaaagtctcttgcaaaagtttctaatagtggtgaccaaaaccaaaacattgaaacgaattctgttgatcgaagaaatgttcttcttggcttaggaggtcttatggtgttgctaatgctataccattagcagcatcggctactcctataccatcccctgatctcaaaacttgtggtagagccaccatatcggatggtccactagtaccctatacttgttgccccctcctatgccaactaactttgacaccattccatattacaagttcccttctatgactaaactccgtatccgtcccctgctcatgctgttgatgaggagtatattgctaagtataatttggccataagtcgaatgaaagatcttgataagacagaccctttaaaccctctt

SEQ ID NO: 1386 - DNA, 507 bp, Artificial
  Mutation introduced by TALE nuclease pair POT33_T01 within a POT33 allele
caagtgtgtgcaatagtagttctactactacaactctcaaaactcctttcatttcatccaatacttctttaggttccactcctaagccctctttcctccatggaaaacgtaacaaaactttcaaagtctcttgcaaagtttctaatagtggtgaccaaaaccaaaacattgaaacgaattctgttgatcgaagaaatgttcttcttggcttaggaggtctttatggtgttgctaatgctataccattagcagcatcggctactcctataccatcccctgatctcaaaacttgtggtagagccaccatatcggatggtccactagtaccctatacttgttgcccccctcctatgccaactaactttgacactcttacagtcctctctgactaaactaccgtcatccgtccccgtccgctcatgctgttgatgaggagtatattgctaagtatatttggccataagtcgaatgaaagatcttgataagacagaccctttaaaccctctt

SEQ ID NO: 1387 - DNA, 507 bp, Artificial
  Mutation introduced by TALE nuclease pair POT33_T01 within a POT33 allele
tgcaatagtagttctactactacaactctcaaaactcctttcatttcatccaatacttctttaggttccactcctaagccccttttcctccatggaaaacgtaacaaaactttcaaagtctcttgcaaagtttctaatagtggtgaccaaaaccaaaacattgaaacgaattctgttgatcgaagaaatgttcttcttggcttaggaggtctttatggtgttgctaatgctataccattagcagcatcggctactcctataccatcccctgatctcaaaacttgtggtagagccaccatatcggatggtccactagtaccctatacttgttgcccccctcctatgccaactaactttgacaccattccatattacaagttcccttctatgactaaactccgtatccgtccccctgctcatgctgttgatgaggagtatattgctaagtataatttggccataagtcgaatgaaagatcttgataagacagaccctttaaaccctctt

SEQ ID NO: 1388 - DNA, 513 bp, Artificial
  Mutation introduced by TALE nuclease pair POT33_T01 within a POT33 allele
caagtgtgtgcaatagtagttctactactacaactctcaaaactcctttcatttcatccaatacttctttaggttccactcctaagccctttcctccatggaaaacgtaacaaaactttcaaagtctcttgcaaagtttctaatagtggtgaccaaaaccaaaacattgaaacgaattctgttgatcgaagaaatgttcttcttggcttaggaggtctttatggtgttgctaatgctataccattagcagcatcggctactcctataccatcccctgatctcaaaacttgtggtagagccaccatatcggatggtccactagtaccctatacttgttgcccccctcctatgccaaactaactttgacaccattccatattacaagttcccttctatgactaaactccgtatccgtcccctgctcatgctgttgatgaggagtatattgctaagtataatttggccataagtcgaatgaaagatcttgataagacagaccctttaaaccctctt

SEQ ID NO: 1389 - DNA, 491 bp, Artificial
  Mutation introduced by TALE nuclease pair POT33_T01 within a POT33 allele
caagtgtgtgcaatagtagttctactactacaactctcaaaactcctttcatttcatccaatactggaaaacgtaacaaaactttcaaagtctcttgcaaagtttctaatagtggtgaccaaaaccaaaacattgaaacgaattctgttgatcgaagaaatgttcttcttggcttaggaggtctttatggtgttgctaatgctataccattagcagcatcggctactcctataccatcccctgatctcaaaacttgtggtagagccaccatatcggatggtccactagtaccctatacttgttgcccccctcctatgccaactaactttgactaccattccatattactaagttcccttctcatgcactaaactaccgtcatccgtcccctcgctccatgctgttgatgtaggagtagtattgcttaagatataatttgggccataagtcgaatgaaagatcttgataagacagaccctttaaaccctctt

SEQ ID NO: 1390 - DNA, 511 bp, Artificial
  Mutation introduced by TALE nuclease pair POT33_T01 within a POT33 allele
  misc_feature (96): n is a or c or t or g
caagtgtgtgcaatagtagttctactactacaactctcaaaactcctttcatttcatccaatacttctttaggttccactcctaagcccttttccnccatggaaaacgtacaaaactttcaaagtctcttgcaaagtttctaatagtggtgaccaaaaccaaaacattgaaacgaattctgttgatcgaagaaatgttcttcttggcttaggaggtctttatggtgttgctaatgctataccattagcagcatcggctactcctataccatcccctgatctcaaaacttgtggtagagccaccatatcggatggtccactagtaccctatacttgttgccccctcctatgccaactaactttgacaccattccatattacaagttcccttctatgactaaactccgtatccgtcccctgctcatgctgttgatgaggagtatattgctaagtataatttggccataagtcgaatgaaagatcttgataagacagaccctttaaaccctctt

SEQ ID NO: 1391 - DNA, 416 bp, Artificial
  Mutation introduced by TALE nuclease pair POT33_T01 within a POT33 allele
caagtgtgtgcaatagtagttctactactacaactctcaaaactcctttcatttcatccaatacttctttaggttccactcctaagccctcctccatggaaaacgtaacaaaactttcaaagtctcttgcaaagtttctaatagtggtgaccaaaaccaaaacattgaaacgaattctgttgatcgaagaaatgttcttcttggcttaggaggtctttatggtgttgctaatgctatacattagcagcatcggctactcctataccatcccctgatctcaaaacttgtggtagagccaccatatcggatggtccactagtaccctatacttgttgccccctcctatgccaactaactttgacaccattccatattacaagttcccttctatgactaaactccgtatccgtcccccg

SEQ ID NO: 1392 - DNA, 513 bp, Artificial
  Mutation introduced by TALE nuclease pair POT33_T01 within a POT33 allele
caagtgtgtgcaatagtagttctactactacaactctcaaaactcctttcatttcatccaatacttctttaggttccactcctaagcccttttcctccatggaaaacgtaacaaaactttcaaagtctcttgcaaaagtttctaatagtggtgaccaaaaccaaaacattgaaacgaattctgttgatcgaagaaatgttcttcttggcttaggaggtctttatggtgttgctaatgctataccattagcagcatcggctactcctataccatcccctgatctcaaaacttgtggtagagccaccatatcggatggtccactagtaccctatacttgttgccccctcctatgccaactaactttgacaccattccatattacaagttcccttctatgactaaactccgtatccgtcccctgctcatgctgttgatgaggagtatattgctaagtataatttggccataagtcgaatgaaagatcttgataagacagaccctttaaaccctctt

SEQ ID NO: 1393 - DNA, 497 bp, Artificial
  Mutation introduced by TALE nuclease pair POT33_T01 within a POT33 allele
caagtgtgtgcaatagtagttctactactacaactctcaaaactcctttcatttcatccaatacttctttaggttccactcctaagccctttcctccatggaaaacgtaacaaaactttcaaagtctcttgcaaagtttctaatagtggtgaccaaaaccaaaacattgaaacgaattctgttgatcgaagaaatgttcttcttggcttaggaggtctttatggtgttgctaatgctataccattagcagcatcggctactcctataccatcccctgatctcaaaacttgtggtagagccaccatatcggatggtccactagtaccctatacttgttgccccctcctatgccaactaactttgacaccattccatattacaagttcccttctatgactaaactccgtatccgtcccctgctcatgctgttgatgaggagtatattgctaagtataatttggccataagtcgaatgaaagatcttgataagacagacc

SEQ ID NO: 1394 - DNA, 510 bp, Artificial
  Mutation introduced by TALE nuclease pair POT33_T01 within a POT33 allele
caagtgtgtgcaatagtagttctactactacaactctcaaaactcctttcatttcatccaatacttctttaggttccactcctaagcccttttcctccatggaaaacgtaacaaaactttcaaagtctcttgcaaagtttctaatagtggtgaccaaaaccaaaacattgaaacgaattctgttgatcgaagaaatgttcttcttggcttaggaggtctttatggtgttgctaatgctataccattagcagcatcggctactcctataccatcccctgatctcaaaacttgtggtagagccaccatatcggatggtccactagtaccctatacttgttgccccctcctatgccaactaactttgacaccattccatattacaagttcccttctatgactaaactccgtatccgtcccctgctcatgctgttgatgaggagtatattgctaagtataatttggccataagtcgaatgaaagatcttgataagacagaccctttaaacctct

SEQ ID NO: 1395 - DNA, 511 bp, Artificial
  Mutation introduced by TALE nuclease pair POT33_T01 within a POT33 allele
caagtgtgtgcaatagtagttctactactacaactctcaaaactcctttcatttcatccaatacttctttaggttccactcctaagccctcttcctccatggaaaacgtaacaaaactttcaaagtctcttgcaaagtttctaatagtggtgaccaaaaccaaaacattgaaacgaattctgttgatcgaagaaatgttcttcttggcttaggaggtctttatggtgttgctaatgctataccattagcagcatcggctactcctataccatcccctgatctcaaaacttgtggtagagccaccatatcggatggtccactagtaccctatacttgttgccccctcctatgccaactaactttgacaccattccatattacaagttcccttctatgactaaactccgtatccgtcccctgctcatgctgttgatgaggagtatattgctaagtataatttggccataagtcgaatgaagatcttgataagacagaccctttaaaccctctt

SEQ ID NO: 1396 - DNA, 511 bp, Artificial
  Mutation introduced by TALE nuclease pair POT33_T01 within a POT33 allele
caagtgtgtgcaatagtagttctactactacaactctcaaaactcctttcatttcatccaatacttctttaggttccactcctaagcccttcctccatggaaaacgtaacaaaactttcaaagtctcttgcaaagtttctaatagtggtgaccaaaaccaaaacattgaaacgaattctgttgatcgaagaaatgttcttcttggcttaggaggtctttatggtgttgctaatgctataccattagcagcatcggctactcctataccatcccctgatctcaaaacttgtggtagagccaccatatcggatggtccactagtaccctatacttgttgcccccctcctatgccaactaactttgacaccattccatattacaagttcccttctatgactaaactccgtatccgtcccctgctcatgctgttgatgaggagtatattgctaagtataatttggccataagtcgaatgaaagatcttgataagacagaccctttaaaccctctt

SEQ ID NO: 1397 - DNA, 450 bp, Artificial
  Mutation introduced by TALE nuclease pair POT33_T01 within a POT33 allele
caagtgtgtgcaatagtagttctactactaacaactctcaaaactcctttcatttcatccaatacttctttaggttccactcctaagccctcttttcctccatggaaaacgtaacaaaactttcaagtctcttgcaaagtttctaatagtggtgaccaaaaccaaaacattgaaacgaattctgttgatcgaagaaatgttcttcttggcttaggaggtctttatggtgttgctaatgctataccattagcagcatcggctactcctataccatcccctgatctcaaaacttgtggtagagccaccatcatcggatggtccactagtaccctatacttgttgccccctcctatgccaactaaactttgacaccattccatattacaagttcccttctatgactaaactccgtatccgtcccctgctcatgctgttgatgaggagtatatt

SEQ ID NO: 1398 - DNA, 512 bp, Artificial
  Mutation introduced by TALE nuclease pair POT33_T01 within a POT33 allele
caagtgtgtgcaatagtagttctactactacaactctcaaaactcctttcatttcatccaatacttctttaggttccactcctaagccctctttcctccatggaaaacgtaacaaaactttcaaagtctcttgcaaagtttctaatagtggtgaccaaaaccaaaacattgaaacgaattctgttgatcgaagaaatgttcttcttggcttaggaggtctttatggtgttgctaatgctataccattagcagcatcggctactcctataccatcccctgatctcaaaacttgtggtagagccaccatatcggatggtccactagtaccctatacttgttgcccctcctatgccaactaactttgacaccattccatattacaagttcccttctatgactaaactccgtatccgtcccctgctcatgctgttgatgaggagtatattgctaagtataatttggccataagtcgaatgaaagatcttgataagacagaccctttaaaccctctt

SEQ ID NO: 1399 - DNA, 505 bp, Artificial
  Mutation introduced by TALE nuclease pair POT33_T01 within a POT33 allele
caagtgtgtgcaatagtagttctactactacaactctcaaaactcctttcatttcatccaatacttctttaggttccactcctaagcccatggaaaacgtaacaaaactttcaaagtctcttgcaaagtttctaatagtggtgaccaaaaccaaaacattgaaacgaattctgttgatcgaagaaatgttcttcttggcttaggaggtctttatggtgttgctaatgctataccattagcagcatcggctactcctataccatcccctgatctcaaaacttgtggtagagccaccatatcggatggtccactagtaccctatacttgttgcccccctcctatgccaactaactttgacaccattccatattacaagttcccttctatgactaaactccgtatccgtcccctgctccatgctgttgatgaggagtatattgctaagtataatttggccataagtcgaatgaaagatcttgataagacagaccctttaaaccctctt

SEQ ID NO: 1400 - DNA, 505 bp, Artificial
  Mutation introduced by TALE nuclease pair POT33_T01 within a POT33 allele
caagtgtgtgcaatagtagttctactactacaactctcaaaactccttttcatttcatccaatacttctttaggttccactcctaagccctttcctccatggaaaacgtaacaaaactttcaaagtctcttgcaaagtttctaatagtggtgaccaaaaccaaaacattgaaacgaattctgttgatcgaagaaatgttcttcttggcttaggaggtctttatggtgttgctaatgctataccattagcagcatcggctactcctataccatccccctgatctcaaaacttgtggtagagccaccatatcggatggtccactagtaccctatacttgttgcccccctcctatgccaactaactttgacaccattccatattacaagttcccttctatgactaaactccgtatccgtccccctgctcatgctgttgatgaggagtatattgctaagtataatttggccataagtcgaatgaaagatcttgataagacagacccttt

SEQ ID NO: 1401 - DNA, 513 bp, Artificial
  Mutation introduced by TALE nuclease pair POT33_T01 within a POT33 allele
caagtgtgtgcaatagtagttctactactacaactctcaaaactcctttcatttcatccaatacttctttaggttccactcctaagcccttttcctccatggaaaacgtaacaaaactttcaaagtctcttgcaaagtttctaatagtggtgaccaaaaccaaaacattgaaacgaattctgttgatcgaagaaatgttcttcttggcttaggaggtctttatggtgattgctaatgctataccattagcagcatcggctactcctataccatcccctgatctcaaaacttgtggtagagccaccatatcggatggtccactagtaccctatacttgttgccccctcctatgccaactaactttgacaccattccatattacaagttcccttctatgactaaactccgtatccgtcccctgctcatgctgttgatgaggagtatattgctaagtataatttggccataagtcgaatgaaagatcttgataagacagaccctttaaaccctctt

SEQ ID NO: 1402 - DNA, 507 bp, Artificial
  Mutation introduced by TALE nuclease pair POT33_T01 within a POT33 allele
caagtgtgtgcaatagtagttctactactacaactctcaaaactcctttcatttcatccaatacttctttaggttccactcctaagttcctccatggaaaacgtaacaaaactttcaaagtctcttgcaaagtttctaatagtggtgaccaaaaccaaaacattgaaacgaattctgttgatcgaagaaatgttcttcttggcttaggaggtctttatggtgttgctaatgctataccattagcagcatcggctactcctataccatcccctgatctcaaaacttgtggtagagccaccatatcggatggtccactagtaccctatacttgttgccccctcctatgccaactaactttgacaccattccatattacaagttcccttctatgactaaactccgtatccgtcccctgctcatgctgttgatgaggagtatattgctaagtataatttggccataagtcgaatgaaagatcttgataagacagaccctttaaaccctctt

SEQ ID NO: 1403 - DNA, 513 bp, Artificial
  Mutation introduced by TALE nuclease pair POT33_T01 within a POT33 allele
caagtgtgtgcaatagtagttctactactacaactctcaaaactcctttcatttcatccaatacttctttaggttccactcctaagcccttcctccatggaaaacgtaacaaaacttacaaagtctcttgcaaagtttctaatagtggtgaccaaaaccaaaacattgaaacgaattctgttgatcgaagaaatgttcttcttggcttaggaggtctttatggtgttgctaatgctataccattagcagcatcggctactcctataccatccccctgatctcaaaacttgtggtagagccaccatatcggatggtccactagtaccctatacttgttgcccccctcctatgccaactaactttgacaccattccatattacaagttcccttctatgactaaactccgtatccgtccccctgctcatgctgttgatgaggagtatattgctaagtataatttggccataagtcgaatgaaagatcttgataagacagaccctttaaaccctctt

SEQ ID NO: 1404 - DNA, 511 bp, Artificial
  Mutation introduced by TALE nuclease pair POT33_T01 within a POT33 allele
  misc_feature (125); (147): n is a or c or t or g
caagtgtgtgcaatagtagttctactactacaactctcaaaactcctttcatttcatccaatacttctttaggttccactcctaagccctctttcctccaggaaaacgtaacaaaactttcaagnctcttgcaaagtttctaatagnggtgaccaaaaccaaaacttgaaacgaattctgttgatcgaagaaatgttcttcttggcttaggaggtctttatggtgttgctaatgctataccattagcagcatcggctactcctataccatcccctgatctcaaaacttgtggtagagccaccatatcggatggtccactagtaccctatacttgttgcccccctcctatgccaactaactttgacaccattccatattacaagttcccttctatgactaaactccgtatccgtcccctgctcatgctgttgatgaggagtatattgctaagtataatttggccataagtcgaatgaaagatcttgataagacagaccctttaaaccctctt

SEQ ID NO: 1405 - DNA, 515 bp, Artificial
  Mutation introduced by TALE nuclease pair POT33_T01 within a POT33 allele
  misc_feature (129); (153): n is a or c or t or g
caagtgtgtgcaatagtagttctactactacaactctcaaaactcctttcatttcatccaatacttctttaggttccactcctaagccctttttcctccatgggaaaaacgtaacaaaactttcaaagnctcttgcaaaagttttctaatagnggtgaccaaaaccaaaacttgaaacgaattctgttgatcgaagaaatgttcttcttggcttaggaggtcttatggtgttgctaatgctataccattagcagcatcggctactcctataccatcccctgatctcaaaacttgtggtagagccaccatatcggatggtccactagtaccctatacttgttgccccctcctatgccaactaactttgacaccattccatattacaagttcccttctatgactaaactccgtatccgtcccctgctcatgctgttgatgaggagtatattgctaagtataatttggccataagtcgaatgaaagatcttgataagacagaccctttaaaccctctt

SEQ ID NO: 1406 - DNA, 518 bp, Artificial
  Mutation introduced by TALE nuclease pair POT33_T01 within a POT33 allele
caagtgtgtgcaatagtagttctactactacaactctcaaaactcctttcatttcatccaatacttctttaggttccactcctaagccctctttcctccatggaaaacgtaacaaaactttcaaagtctcttgcaaaagtttctaatagtggtgaccaaaaccaaaacattgaaacgaattctgttgatcgaagaaatgttcttcttggcttaggaggtctttatggtgttgctaatgctataccattagcagcatcggctactcctataccatcccctgatctcaaaacttgtggtagagccaccatatcggatggtccactagtaccctatacttgttgcccccctcctatgccaaactaacttttgacaccattccatattacaagttcccttctatgactaaactccgtatccgtcccctgctcatgctgttgatgaggagtatattgctaagtataattttggccataagtcgaatgaaagatcttgataagacagaccctttaaaccctctt

SEQ ID NO: 1407 - DNA, 510 bp, Artificial
  Mutation introduced by TALE nuclease pair POT33_T01 within a POT33 allele
caagtgtgtgcaatagtagttctactactacaactctcaaaactcctttcatttcatccaatacttctttaggttccactcctaagcccttcctccatggaaaacgtaacaaaactttcaaagtctcttgcaaaagtttctaatagtggtgaccaaaaccaaaacattgaaacgaattctgttgatcgaagaaatgttcttcttggcttaggaggtctttatggtgttgctaatgctataccattagcagcatcggctactcctataccatcccctgatctcaaaacttgtggtagagccaccatatcggatggtccactagtaccctatacttgttgccccctcctatgccaactaactttgacaccattccatattacaagttcccttctatgactaaactccgatccgtcccctgctcatgctgttgatgaggagtatattgctaagtataatttggccataagtcgaatgaaagatcttgataagacagaccctttaaaccctctt

SEQ ID NO: 1408 - DNA, 515 bp, Artificial
  Mutation introduced by TALE nuclease pair POT33_T01 within a POT33 allele
caagtgtgtgcaatagtagttctactactacaactctcaaaactcctttcatttcatccaatacttctttaggttccactcctaagccctctttcctccatggaaaacgtaacaaaactttcaaagtctcttgcaaaagtttctaatagtggtgaccaaaaccaaaacattgaaacgaattctgttgatcgaagaaatgttcttcttggcttaggaggtctttatggtgttgctaatgctataccattagcagcatcggctactcctataccatcccctgatctcaaaacttgtggtagagccaccatatcggatggtccactagtaccctatacttgttgcccccctcctatgccaactaactttgacaccattccatattacaagttcccttctatgactaaactccgtatccgtcccctgctcatgctgttgatgaggagtatattgctaagtataatttggccataagtcgaatgaaagatcttgataagacagaccctttaaaccctctt

SEQ ID NO: 1409 - DNA, 511 bp, Artificial
  Mutation introduced by TALE nuclease pair POT33_T01 within a POT33 allele
caagtgtgtgcaatagtagttctactactacaactctcaaaactcctttcattcatccaatacttctttaggttccactcctaagccctcttcctccatggaaaacgtaacaaaactttcaaagtctcttgcaaagtttctaatagtggtgaccaaaaccaaaacattgaaacgaattctgttgatcgaagaaatgttcttcttggcttaggaggtctttatggtgttgctaatgctataccattagcagcatcggctactcctataccatcccctgatctcaaaacttgtggtagagccaccatatcggatggtccactagtaccctatacttgttgccccctcctatgccaactaactttgacaccattccatattacaagttcccttctatgactaaactccgtatccgtcccctgctcatgctgttgatgaggagtatattgctaagtataatttggccataagtcgaatgaaagatcttgataagacagaccctttaaaccctctt

SEQ ID NO: 1410 - DNA, 492 bp, Artificial
  Mutation introduced by TALE nuclease pair POT33_T01 within a POT33 allele
caagtgtgtgcaatagtagttctactactacaactctcaaaactcctttcatttcatccaatacttctttaggttccactcctaagcccttttcctccatggaaaacgtaacaaaactttcaaagtctcttgcaaagtttctaatagtggtgaccaaaaccaaaacattgaaacgaattctgttgatcgaagaaatgttcttcttggcttaggaggtctttatggtgttgctaatgctataccattagcagcatcggctactcctataccatcccctgatctcaaaacttgtggtagagccaccatatcggatggtccactagtaccctatacttgttgcccccctcctatgccaactaactttgacaccattccatattacaagttcccttctatgactaaactccgtatccgtcccctgctcatgctgttgatgaggagtatattgctaagtataatttggccataagtcgaatgaaagatcttgataag

SEQ ID NO: 1411 - DNA, 512 bp, Artificial
  Mutation introduced by TALE nuclease pair POT33_T01 within a POT33 allele
caagtgtgtgcaatagtagttctactactacaactctcaaaactcctttcatttcatccaatacttctttaggttccactcctaagccctttcctccatggaaaacgtaacaaaacttcaaagtctcttgcaaaagtttctaatagtggtgaccaaaaccaaaacattgaaacgaattctgttgatcgaagaaatgttcttcttggcttaggaggtctttatggtgttgctaatgctataccattagcagcatcggctactcctataccatcccctgatctcaaaacttgtggtagagccaccatatcggatggtccactagtaccctatacttgttgcccccctcctatgccaactaactttgacaccattccatattacaagttcccttctatgactaaactccgtatccgtcccctgctcatgctgttgatgaggagtatattgctaagtataatttggccataagtcgaatgaaagatcttgataagacagaccctttaaaccctctt

SEQ ID NO: 1412 - DNA, 512 bp, Artificial
  Mutation introduced by TALE nuclease pair POT33_T01 within a POT33 allele
  misc_feature (83): n is a or c or t or g
caagtgtgtgcaatagtagttctactactacaactctcaaaactcctttcatttcatccaatacttctttaggttccactccnaagccctctttcctccaatggaaacgtaacaaaactttcaagtctcttgcaaagtttctaatagtggtgaccaaaaccaaaacattgaaacgaattctgttgatcgaagaaatgttcttctggcttaggaggtctttatggtgttgctaatgctataccattagcagcatcggctactcctataccatcccctgatctcaaaacttgtggtagagccaccatatcgggatggtccactagtaccctatacttgttgccccctcctatgccaactaactttgacaccattccatattacaagttcccttctatgactaaactccgtatccgtcccctgctcatgctgttgatgaggagtatattgctaagtataatttggccataagtcgaatgaaagatcttgataagacagaccctttaaaccctctt

SEQ ID NO: 1413 - DNA, 476 bp, Artificial
  Mutation introduced by TALE nuclease pair POT33_T01 within a POT33 allele
caagtgtgtgcaatagtagttctactactacaactctcaaaactcctttcatttcatccaatacttctttaggttccactcctaagtgtctcttgcaaagtttctaatagtggtgaccaaaaccaaaacattgaaacgaattctgttgatcgaagaaatgttcttcttggcttaggaggtctttatggtgttgctaatgctataccattagcagcatcggctactcctataccatcccctgatctcaaaacttgtggtagagccaccatatcggatggtccactagtaccctatacttgttgcccccctcctatgccaactaactttgacaccattccatattacaagttcccttctatgactaaactccgtatccgtcccctgctcatgctgttgatgaggagtatattgctaagtataatttggccataagtcgaatgaaagatcttgataagacagaccctttaaaccctctt

SEQ ID NO: 1414 - DNA, 514 bp, Artificial
  Mutation introduced by TALE nuclease pair POT33_T01 within a POT33 allele
caagtgtgtgcaatagtagttctactactacaactctcaaaactcctttcatttcatccaatacttctttaggttccactcctaagccctaattcctccatggaaaacgtaacaaaactttcaaagtctcttgcaaagtttctaatagtggtgaccaaaaccaaaacattgaaacgaattctgttgatcgaagaaatgttcttcttggcttaggaggtctttatggtgttgctaatgctataccattagcagcatcggctactcctataccatcccctgatctcaaaacttgtggtagagccaccatatcggatggtccactagtaccctatacttgttgccccctcctatgccaactaactttgacaccattccatattacaagttcccttctatgactaaactccgtgatccgtcccctgctcatgctgttgatgaggagtatattgctaagtataatttggccataagtcgaatgaaagatcttgataagacagaccctttaaaccctctt

SEQ ID NO: 1415 - DNA, 516 bp, Artificial
  Mutation introduced by TALE nuclease pair POT33_T01 within a POT33 allele
  misc_feature (490): n is a or c or t or g
caagtgtgtgcaatagtagttctactactacaactctcaaaactcctttcatttcatccaatacttctttaggttccactcctaaagccctctttcctccatggaaaacgtaacaaaactttcaaagtctcttgcaaagtttctaatagtggtgaccaaaaccaaaacattgaaacgaattctgttgatcgaagaaatgttcttcttggcttaggaggtctttatggtgttgctaatgctataccattagcagcatcggctactcctataccatcccctgatctcaaaacttgtggtagagccaccatatcggatggtccactagtaccctatacttgttgccccctcctatgccaactaactttgacaccattccatattacaagttcccttctatgactaaactccgtatccgtcccctgctcatgctgttgatgaggagtatattgctaagtataatttggccataagctcgaatgaaaggatcttnataagacagaccctttaaaccctctt

SEQ ID NO: 1416 - DNA, 513 bp, Artificial
  Mutation introduced by TALE nuclease pair POT33_T01 within a POT33 allele
caagtgtgtgcaatagtagttctactactacaactctcaaaatctcctttcatttcatccaatacttctttaggttccactcctaagccctctctccatggaaaacgtaacaaaactttcaagtctcttgcaaagtttctaatagtggtgaccaaaaccaaaacattgaaacgaattctgttgatcgaagaaatgttcttcttggcttaggaggtctttatggtgttgctaatgctataccattagcagcatcggctactcctataccatcccctgcatctcaaaacattgtggtagagccaccatatcggatggtccatctagtaccctatacttgttgccccctcctatgccaactaactttgacaccattccatattacaagttcccttctatgactaaactccgtatccgtcccctgctcatgctgttgatgaggagtatattgctaagtataatttggccataagtcgaatgaaagatcttgataagacagaccctttaaaccctctt

SEQ ID NO: 1417 - DNA, 514 bp, Artificial
  Mutation introduced by TALE nuclease pair POT33_T01 within a POT33 allele
caagtgtgtgcaatagtagttctactactacaactctcaaaactcctttcatttcatccaatacttctttaggttccactcctaagcccttttcctccatggaaaacgtaacaaaactttcaaagtctcttgcaaagtttctaatagtggtgaccaaaaccaaaacattgaaacgaattctgttgatcgaagaaatgttcttcttggcttaggaggtctttatggtgttgctaatgctataccattagcagcatcggctactcctataccatcccctgatctcaaaacttgtggtagagccaccatatcggatggtccactagtaccctatacttgttgccccctcctatgccaactaactttgacaccattccatattacaagttcccttctatgactaaactccgtatccgtccccctgctcatgctgttgatgagggagtatattgctaagtataatttggccataagtcgaatgaaagatcttgataagacagaccctttaaaccctctt

SEQ ID NO: 1418 - DNA, 513 bp, Artificial
  Mutation introduced by TALE nuclease pair POT33_T01 within a POT33 allele
caagtgtgtgcaatagtagttctactactacaactctcaaaactcctttcatttcatccaatacttctttaggttccactcctaagccctctctccatggaaaacgtaacaaaactttcaaagtctcttgcaaagtttctaatagtggtgaccaaaaccaaaacattgaaacgaattctgttgatcgaagaaatgttcttcttggcttaggaggtctttatggtgttgctaatgctataccattagcagcatcggctactcctataccatcccctgcatctcaaaacttgtggtagagccaccatcatcggatggtccactagtaccctatacttgttgcccccctcctatgccaactaactttgacaccattccatattacaagttcccttctatgactaaactccgtatccgtcccctgctcatgctgttgatgaggagtatattgctaagtataatttggccataagtcgaatgaaagatcttgataagacagaccctttaaaccctctt

SEQ ID NO: 1419 - DNA, 446 bp, Artificial
  Mutation introduced by TALE nuclease pair POT33_T01 within a POT33 allele
caagtgtgtgcaatagtagttctactactacaactctcaaaactcctttcatttcatccaatacttctttaggttccactcctaagccctttcctccatggaaaacgtaacaaaactttcaaagtctcttgcaaaagtttctaatagtggtgaccaaaaccaaaacattgaaacgaattctgttgatcgaagaaatgttcttcttggcttaggaggtctttatggtgttgctaatgctataccattagcagcatcggctactcctataccatcccctgatctcaaaacttgtggtagagccaccatatcggatggtccactagtaccctatacttgttgcccccactcctatgccaaactaactttgacaccattccatattacaagttcccttctatgactaaactccgtatccgtccccgtgctcatgctgttgatgagggagt

SEQ ID NO: 1420 - DNA, 503 bp, Artificial
  Mutation introduced by TALE nuclease pair POT33_T01 within a POT33 allele
caagtgtgtgcaatagtagttctactactacaactctcaaaactcctttcatttcatccaatacttctttaggttccactcctaagcccttttcctccatggaaaacgtaacaaaactttcaaagtctcttgcaaagtttctaatagtggtgaccaaaaccaaaacattgaaacgaattctgttgatcgaagaaatgttcttcttggcttaggaggtctttatggtgttgctaatgctataccattagcagcatcggctactcctataccatcccctgatctcaaaacttgtgagaccaccatatcggatggtccactagtaccctatacttgttgccccctcctatgccaactaactttgacaccattccatattacaagttcccttctatgactaaaactccgtatccgtcccctgctcatgctgttgatgaggagtatattgctaagtataaatttggccataaagtcgaatgaaaagatcttgataagacagacccttt

SEQ ID NO: 1421 - DNA, 508 bp, Artificial
  Mutation introduced by TALE nuclease pair POT33_T01 within a POT33 allele
caagtgtgtgcaatagtagttctactactacaactctcaaaactcctttcatttcatccaatacttctttaggttccactcctaagcttcctccatggaaaacgtaacaaaactttcaaagtctcttgcaaagtttctaatagtggtgaccaaaaccaaaacattgaaacgaattctgttgatcgaagaaatgttcttcttggcttaggaggtctttatggtgttgctaatgctataccattagcagcatcggctactcctataccatcccctgatctcaaaacttgtggtagagccaccatatcggatggtccactagtaccctatacttgttgccccctcctatgccaactaactttgacaccattccatattacaagttcccttctatgactaaactccgtatccgtcccctgctcatgctgttgatgaggagtatattgctaagtataatttggccataagtcgaatgaaagatcttgataagacagaccctttaaaccctctt

SEQ ID NO: 1422 - DNA, 514 bp, Artificial
  Mutation introduced by TALE nuclease pair POT33_T01 within a POT33 allele
caagtgtgtgcaatagtagttctactactacaactctcaaaactcctttcatttcatccaatacttctttaggttccactcctaagccctctttcctccatggaaaacgtaacaaaactttcaaagtctcttgcaaagtttctaatagtggtgaccaaaaccaaaacattgaaacgaattctgttgatcgaagaaatgttcttcttggcttaggaggtctttatggtgttgctaatgctataccattagcagcatcggctactcctataccatcccctgatctcaaaacttgtggtagagccaccatatcggatggtccactagtaccctatacttgttgccccctcctatgccaactaactttgacaccattccatattacaagttcccttctatgactaaactccgtatccgtccccctgctcatgctgttgatgaggagtatattgctaagtataatttggccataagtcgaatgaaagatcttgataagacagaccctttaaaccctctt

SEQ ID NO: 1423 - DNA, 510 bp, Artificial
  Mutation introduced by TALE nuclease pair POT33_T01 within a POT33 allele
  misc_feature (124); (147); (152); (213): n is a or c or t or g
caagtgtgtgcaatagtagttctactactacaactctcaaaactcctttcatttcatccaatacttctttaggttccactcctaagccctcttcctccaggaaaacgtaacaaaactttcaagnctcttgcaaaagtttctaatagnggtgnccaaaaccaaacttgaaacgaattctgttgatcgaagaaatgttcttctggcttaggaggnctttatggtgttgctaatgctataccattagcagcatcggctactccatataccatcccctgatctcaaaacttgtggtagagccaccatatcggatggtccactagtaccctatacttgttgcccccctcctatgccaactaactttgacaccattccatattacaagttcccttctatgactaaactccgtatccgtcccctgctcatgctgttgatgaggagtatattgctaagtataatttggccataagtcgaatgaaagatcttgataagacagaccctttaaaccctctt

SEQ ID NO: 1424 - DNA, 513 bp, Artificial
  Mutation introduced by TALE nuclease pair POT33_T01 within a POT33 allele
caagtgtgtgcaatagtagttctactactacaactctcaaaactcctttcatttcatccaatacttctttaggttccactcctaagccctcttttcctccatggaaaacgtaacaaaactttcaagtctcttgcaaagtttctaatagtggtgaccaaaaccaaaacattgaaacgaattctgttgatcgaagaaatgttcttcttggcttaggaggtctttatggtgttgctaatgctataccattagcagcatcggctactcctataccatcccctgatctcaaaacttgtggtagagccaccatatcggatggtccactagtaccctatacttgttgccccctcctatgccaactaactttgacaccattccatattacaagttcccttctatgactaaactccgtatccgtcccctgctcatgctgttgatgaggagtatattgctaagtataatttggtcataagtcgaatgaaagatcttgataagacagaccctttaaaccctctt

SEQ ID NO: 1425 - DNA, 512 bp, Artificial
  Mutation introduced by TALE nuclease pair POT33_T01 within a POT33 allele
caagtgtgtgcaatagtagttctactactacaactctcaaaactcctttcatttcatccaatacttctttaggttccactcctaagctctcttcctccatggaaaacgtaacaaaactttcaaagtctcttgcaaagtttctaatagtggtgaccaaaaccaaaacattgaaacgaattctgttgatcgaagaaatgttcttcttggcttaggaggtctttatggtgttgctaatgctataccattagcagcatcggctactcctataccatcccctgatctcaaaacttgtggtagagccaccatatcggatggtccactagtaccctatacttgttgccccctcctatgccaactaactttgacaccattccatattacaagttcccttctatgactaaactccgtatccgtcccctgctcatgctgttgatgaggagtatattgctaagtataatttggccataagtcgaatgaaagatcttgataagacagaccctttaaaccctctt

SEQ ID NO: 1426 - DNA, 411 bp, Artificial
  Mutation introduced by TALE nuclease pair POT33_T01 within a POT33 allele
caagtgtgtgcaatagtagttctactactacaactctcaaaactcctttcatttcatccaatacttctttaggttccactcctaagccctcctccatggaaaacgtaacaaaacttcaaagtctcttgcaaagtttctaatagtggtgaccaaaaccaaaacattgaaacgaattctgttgatcgaagaaatgttcttcttggcttaggaggtctttatggtgttgctaatgctataccattagcagcatcggctactcctataccatcccctgatctcaaaacttgtggtagagccaccatatcggatggtccactagtaccctatacttgttgcccccctcctatgccaactaactttgacaccattccatattacaagttcccttctatgactaaactccgtatccgt

SEQ ID NO: 1427 - DNA, 518 bp, Artificial
  Mutation introduced by TALE nuclease pair POT33_T01 within a POT33 allele
caagtgtgtgcaatagtagttctactactacaactctcaaaactcctttcatttcatccaatacttctttaggttccactcctaagccctttcctccatggaaaacgtaacaaaactttcaaagtctcttgcaaaagtttctaatagtggtgaccaaaaccaaaacattgaaacgaattctgttgatcgaagaaatgttcttcttggcttaggaggtctttatggtgttgctaatgctataccattagcagcatcggctactcctataccatcccctgatctcaaaacttgtggtagagccaccatatcggatggtccaactagtaccctatacttgttgcccccctcctatgccaactaaactttgacaccattccatattacaaagttcccttctatgaactaaactccgtatccgtcccctgctcatgctgttgatgaggagtatattgctaagtataattttggccataagtcgaatgaaagatcttgataagacagaccctttaaaccctctt

SEQ ID NO: 1428 - DNA, 502 bp, Artificial
  Mutation introduced by TALE nuclease pair POT33_T01 within a POT33 allele
caagtgtgtgcaatagtagttctactactacaactctcaaaactcctttcatttcatccaatacttctttaggttccactcctaagcctggaaaacgtaacaaaactttcaaagtctcttgcaaagtttctaatagtggtgaccaaaaccaaaacattgaaacgaattctgttgatcgaagaaatgttcttcttggcttaggaggtctttatggtgttgctaatgctataccattagcagcatcggctactcctataccatcccctgatctcaaaacttgtggtagagccaccatatcggatggtccactagtaccctatacttgttgcccccctcctatgccaactaactttgacaccattccatattacaagttcccttctatgactaaactccgtatccgtcccctgctcatgctgttgatgaggagtatattgctaagtataatttggccataagtcgaatgaaagatcttgataagacagaccctttaaaccctctt

SEQ ID NO: 1429 - DNA, 514 bp, Artificial
  Mutation introduced by TALE nuclease pair POT33_T01 within a POT33 allele
caagtgtgtgcaatagtagttctactactacaactctcaaaactcctttcatttcatccaatacttctttaggttccactcctaagccctctttcctccatggaaaacgtaacaaaactttcaaagtctcttgcaaaagtttctaatagtggtgaccaaaaccaaaacattgaaacgaattctgttgatcgaagaaatgttcttcttggcttaggaggtctttatggtgttgctaatgctataccattagcagcatcggctactcctataccatcccctgatctcaaaacttgtggtagagccaccatatcggatggtccactagtaccctatacttgttgccccctcctatgccaactaactttgacaccattccatattacaagttcccttctatgactaaactccgtatccgtcccctgctcatgctgttgatgaggagtatattgctaagtataatttggccataagtcgaatgaaagatcttgataagacagaccctttaaaccctctt

SEQ ID NO: 1430 - DNA, 515 bp, Artificial
  Mutation introduced by TALE nuclease pair POT33_T01 within a POT33 allele
caagtgtgtgcaatagtagttctactactacaactctcaaaactcctttcatttcatccaatacttctttaggttccactcctaagccctcttttcctccatggaaaacgtaacaaaactttcaaagtctcttgcaaaagtttctaatagtggtgaccaaaaccaaaacattgaaacgaattctgttgatcgaagaaatgttcttcttggcttaggaggtctttatggtgttgctaatgctataccattagcagcatcggctactcctataccatcccctgatctcaaaacttgtggtagagccaccatatcggatggtccactagtaccctatacttgttgccccctcctatgccaactaactttgacaccattccatattacaagttcccttctatgactaaactccgtatccgtcccctgctcatgctgttgatgaggagtatattgctaagtataatttggccataagtcgaatgaaagatcttgataagacagaccctttaaaccctctt

SEQ ID NO: 1431 - DNA, 466 bp, Artificial
  Mutation introduced by TALE nuclease pair POT33_T01 within a POT33 allele
caagtgtgtgcaatagtagttctactactacaactctcaaaactcctttcatttcatccaatacttctttaggttccactcctaagtgtctcttgcaaagtttctaatagtggtgaccaaaaccaaaacattgaaacgaattctgttgatcgaagaaatgttcttcttggcttaggaggtctttatggtgttgctaatgctataccattagcagcatcggctactcctataccatcccctgatctcaaaacttgtggtagagccaccatatcggatggtccactagtaccctatacttgttgcccccctcctatgccaactaactttgacaccattccatattacaagttcccttctatgactaaactccgtatccgtcccctgctcatgctgttgatgaggagtatattgctaagtataatttggccataagtcgaatgaaagatcttgataagacagacccttt

SEQ ID NO: 1432 - DNA, 490 bp, Artificial
  Mutation introduced by TALE nuclease pair POT33_T01 within a POT33 allele
caagtgtgtgcaatagtagttctactactacaactctcaaaactcctttcatttcatccaatacttctttaggttccactcctaagccctctcttcctccatggaaaacgtaacaaaactttcaaagtctcttgcaaagtttctaatagtggtgaccaaaaccaaaacattgaaacgaattctgttgatcgaagaaatgttcttcttggcttaggaggtctttatggtgttgctaatgctataccattagcagcatcggctactcctataccatcccctgatctcaaaacttgtggtagagccaccatatcggaatggtccactagtaccctatacttgttgccccctcctatgccaactaactttgacaccattccatattacaagttcccttctatgactaaactccgtatccgtcccctgctcatgctgttgatgaggagtatattgctaagtataatttggccataagtcgaatgaaagatcttga

SEQ ID NO: 1433 - DNA, 513 bp, Artificial
  Mutation introduced by TALE nuclease pair POT33_T01 within a POT33 allele
  misc_feature (125); (149): n is a or c or t or g
caagtgtgtgcaatagtagttctactactacaactctcaaaactcctttcatttcatccaatacttctttaggttccactcctaagcccttcctccatggaaaaacgtaacaaaactttcaaagnctcttgcaaaagttttctaatagnggtgaccaaaaccaaaacttgaaacgaattctgttgatcgaagaaatgttcttcttggcttaggaggtctttatggtgttgctaatgctatacccattagcagcatcggctactcctataccatcccctgatctcaaaacttgtggtagagccaccatatcggatggtccactagtaccctatacttgttgccccctcctatgccaactaactttgacaccattccatattacaagttcccttctatgactaaactccgtatccgtcccctgctcatgctgttgatgaggagtatattgctaagtataatttggccataagtcgaatgaaagatcttgataagacagaccctttaaaccctctt

SEQ ID NO: 1434 - DNA, 515 bp, Artificial
  Mutation introduced by TALE nuclease pair POT33_T01 within a POT33 allele
caagtgtgtgcaatagtagttctactactacaactctcaaaactcctttcatttcatccaatacttctttaggttccactcctaagccctcttcctccatggaaaacgtaacaaaactttcaaagtctcttgcaaaagtttctaatagtggtgaccaaaaccaaaacattgaaacgaattctgttgatcgaagaaatgttcttcttggcttaggaggtctttatggtgttgctaatgctataccattagcagcatcggctactcctataccatcccctgatctcaaaacttgtggtagagccaccatatcggatggtccactagtaccctatacttgttgcccccctcctatgccaactaactttgacaccattccatattacaagttcccttctatgactaaactccgtatccgtccccctgctcatgctgttgatgaggagtatattgctaagtataatttggccataagtcgaatgaaagatcttgataagacagaccctttaaaccctctt

SEQ ID NO: 1435 - DNA, 510 bp, Artificial
  Mutation introduced by TALE nuclease pair POT33_T01 within a POT33 allele
caagtgtgtgcaatagtagttctactactacaactctcaaaactcctttcatttcatccaatacttctttaggttccactcctaagccttttcctccatggaaaacgtaacaaaactttcaaagtctcttgcaaagtttctaatagtggtgaccaaaaccaaaacattgaaacgaattctgttgatcgaagaaatgttcttcttggcttaggaggtctttatggtgttgctaatgctataccattagcagcatcggctactcctataccatcccctgatctcaaaacttgtggtagagccaccatatcggatggtccactagtaccctatacttgttgcccccctcctatgccaactaactttgacaccattccatattacaagttcccttctatgactaaactccgtatccgtcccctgctcatgctgttgatgaggagtatattgctaagtataatttggccataagtcgaatgaaagatcttgataagacagaccctttaaaccctc

SEQ ID NO: 1436 - DNA, 494 bp, Artificial
  Mutation introduced by TALE nuclease pair POT33_T01 within a POT33 allele
caagtgtgtgcaatagtagttctactactacaactctcaaaactccatttcatttcattccaatacttctttaggttccatctcctacttttccttccatggaaaacgtaaacaaaactttcaaaagtctcttgcaaagtttctaatagtggtgaccaaaaccaaaacattgaaacgaattctgttgatcgaagaaatgttcttcttggcttaggaggtctttatggtgttgctaatgctataccattagcagcatcggctactcctataccatcccctgatctcaaaacttgtggtagagccaccatatcggatggtccactagtaccctatacttgttgcccccctcctatgccaactaactttgacaccattccatattacaagttcccttctatgactaaactccgtatccgtccccctgctcatgctgttgatgaggagtatattgctaagtataatttggccataagtcgaatgaaagatcttgataa

SEQ ID NO: 1437 - DNA, 513 bp, Artificial
  Mutation introduced by TALE nuclease pair POT33_T01 within a POT33 allele
  misc_feature (125): n is a or c or t or g
caagtgtgtgcaatagtagttctactactacaactctcaaaactcctttcatttcatccaatacttctttaggttccactcctaagccctcttcctccaggaaaacgtaacaaaactttcaaagnctcttgcaaaagtttctaatagtggtgaccaaaaccaaaacattgaaacgaattctgttgatcgaagaaatgttcttcttggcttaggaggtctttatggtgttgctaatgctataccattagcagcatcggctactcctataccatcccctgatctcaaaacttgtggtagagccaccatatcggatggtccactagtaccctatacttgttgcccccctcctatgccaactaactttgacaccattccatattacaagttcccttctatgactaaactccgtatccgtcccctgctcatgctgttgatgaggagtatattgctaagtataatttggccataagtcgaatgaaagatcttgataagacagaccctttaaaccctctt

SEQ ID NO: 1438 - DNA, 512 bp, Artificial
  Mutation introduced by TALE nuclease pair POT33_T01 within a POT33 allele
caagtgtgtgcaatagtagttctactactacaactctcaaaactcctttcatttcatccaatacttctttaggttccactcctaagccctttcctccatggaaaacgtaacaaaactttcaaagtctcttgcaaagtttctaatagtggtgaccaaaaccaaaacattgaaacgaattctgttgatcgaagaaatgttcttcttggcttaggaggtctttatggtgttgctaatgctataccattagcagcatcggctactcctataccatcccctgatctcaaaacttgtggtagagccaccatatcggatggtccactagtaccctatacttgttgccccctcctatgccaactaactttgacaccattccatattacaagttcccttctatgactaaactccgtatccgtccccctgctcatgctgttgatgaggagtatattgctaagtataatttggccataagtcgaatgaaagatcttgataagacagaccctttaaaccctctt

SEQ ID NO: 1439 - DNA, 495 bp, Artificial
  Mutation introduced by TALE nuclease pair POT33_T01 within a POT33 allele
caagtgtgtgcaatagtagttctactactacaactctcaaaactcctttcatttcatccaatacttctttaggttccactcctaagccctctttcctccatggaaaacgtaacaaaactttcaaagtctcttgcaaaagtttctaatagtggtgaccaaaaccaaaacattgaaacgaattctgttgatcgaagaaatgttcttcttggcttaggaggtctttatggtgttgctaatgctataccattagcagcatcggctactcctataccatcccctgatctcaaaacttgtggtagagccaccatatcggatggtccactagtaccctatacttgttgccccctcctatgccaactaactttgacaccattccatattacaagttcccttctatgactaaactccgtatccgtccccgtgctcatgctgttgatgagggagtatattgctaagtataattttggccataagtcgaatgaaagatcttgataa

SEQ ID NO: 1440 - DNA, 512 bp, Artificial
  Mutation introduced by TALE nuclease pair POT33_T01 within a POT33 allele
caagtgtgtgcaatagtagttctactactacaactctcaaaactcctttcatttcatccaatacttctttaggttccactcctaagcccttttcctccatggaaaacgtaacaaaactttcaaagtctcttgcaaagtttctaatagtggtgaccaaaaccaaaacattgaaacgaattctgttgatcgaagaaatgttcttctggcttaggaggtctttatggtgttgctaatgctataccattagcagcatcggctactcctataccatcccctgatctcaaaacttgtggtagagccaccatatcgggatggtccactagtaccctatacttgttgccccctcctatgccaactaactttgacaccattccatatttacaagttcccttctatgactaaactccgatccgtcccctgctcatgctgttgatgaggagtatattgctaagtataatttggccataagtcgaatgaaagatcttgataagacagaccctttaaaccctctt

SEQ ID NO: 1441 - DNA, 418 bp, Artificial
  Mutation introduced by TALE nuclease pair POT33_T01 within a POT33 allele
caagtgtgtgcaatagtagttctactactacaactctcaaaactcctttcatttcatccaatacttctttaggttccactcctaagccctcctccatggaaaacgtaacaaaactttcaaagtctcttgcaaagtttctaatagtggtgaccaaaaccaaaacattgaaacgaattctgttgatcgaagaaatgttcttcttggcttaggaggtctttatggtgttgctaatgctatacattagcagcatcggctactcctataccatcccctgatctcaaaacttgtggtagagccaccatatcggatggtccactagtaccctatacttgttgccccctcctatgccaactaactttgacaccattccatattacaagttcccttctatgactaaactccgtatccgtcccccgct

SEQ ID NO: 1442 - DNA, 513 bp, Artificial
  Mutation introduced by TALE nuclease pair POT33_T01 within a POT33 allele
caagtgtgtgcaatagtagttctactactacaactctcaaaactcctttcatttcatccaatacttctttaggttccactcctaagccctattcctccatggaaaacgtaacaaaactttcaaagtctcttgcaaagtttctaatagtggtgaccaaaaccaaaacattgaaacgaattctgttgatcgaagaaatgttcttcttggcttaggaggtctttatggtgttgctaatgctataccattagcagcatcggctactcctataccatcccctgatctcaaaacttgtggtagagccaccatatcggatggtccactagtaccctatacttgttgcccccctcctatgccaactaactttgacaccattccatattacaagttcccttctatgactaaactccgtatccgtcccctgctcatgctgttgatgaggagtatattgctaagtataatttggccataagtcgaatgaaagatcttgataagacagaccctttaaaccctctt

SEQ ID NO: 1443 - DNA, 511 bp, Artificial
  Mutation introduced by TALE nuclease pair POT33_T01 within a POT33 allele
caagtgtgtgcaatagtagttctactactacaactctcaaaactcctttcatttcatccaatacttctttaggttccactcctaagccttcctccatggaaaacgtaacaaaactttcaaagtctcttgcaaaagttttctaatagtggtgaccaaaaccaaaacattgaaacgaattctgttgatcgaagaaatgttcttcttggcttaggaggtctttatggtgttgctaatgctataccattagcagcatcggctactcctataccatcccctgatctcaaaacttgtggtagagccaccatatcggatggtccactagtaccctatacttgttgccccctcctatgccaactaactttgacaccattccatattacaagttcccttctatgactaaactccgtatccgtcccctgctcatgctgttgatgaggagtatattgctaagtataatttggccataagtcgaatgaaagatcttgataagacagaccctttaaaccctctt

SEQ ID NO: 1444 - DNA, 512 bp, Artificial
  Mutation introduced by TALE nuclease pair POT33_T01 within a POT33 allele
  misc_feature (125): n is a or c or t or g
caagtgtgtgcaatagtagttctactactacaactctcaaaactcctttcatttcatccaatacttctttaggttccactcctaagccctttcctccatggaaaacgtaacaaaactttcaaagnctcttgcaaaagttttctaatagtggtgaccaaaaccaaaacttgaaacgaattctgttgatcgaagaaatgttcttcttggcttaggaggtctttatggtgttgctaatgctataccattagcagcatcggctactcctataccatcccctgatctcaaaacttgtggtagagccaccatatcggatggtccactagtaccctatacttgttgccccctcctatgccaactaactttgacaccattccatattacaagttcccttctatgactaaactccgtatccgtcccctgctcatgctgttgatgaggagtatattgctaagtataatttggccataagtcgaatgaaagatcttgataagacagaccctttaaaccctctt

SEQ ID NO: 1445 - DNA, 512 bp, Artificial
  Mutation introduced by TALE nuclease pair POT33_T01 within a POT33 allele
caagtgtgtgcaatagtagttctactactacaactctcaaaactcctttcatttcatccaatacttctttaggttccactcctaagccctttcctccatggaaaacgtaacaaaactttcaaagtctcttgcaaagtttctaatagtggtgaccaaaaccaaaacattgaaacgaattctgttgatcgaagaaatgttcttcttggcttaggaggtctttatggtgttgctaatgctataccattagcagcatcggctactcctataccatcccctgatctcaaaacttgtggtagagccaccatatcggatggtccactagtaccctatacttgttgccccctcctatgccaactaactttgacaccattccatattacaagttcccttctatgactaaactccgtatccgtcccctgctcatgctgttgatgagggagtatattgctaagtataatttggccataagtcgaatgaaagatcttgataagacagaccctttaaaccctctt

SEQ ID NO: 1446 - DNA, 511 bp, Artificial
  Mutation introduced by TALE nuclease pair POT33_T01 within a POT33 allele
caagtgtgtgcaatagtagttctactactacaactctcaaaactcctttcatttcatccaatacttctttaggttccactcctaagctttcctccatggaaaacgtaacaaaactttcaaagtctcttgcaaaagtttctaatagtggtgaccaaaaccaaaacattgaaacgaattctgttgatcgaagaaatgttcttcttggcttaggaggtctttatggtgttgctaatgctataccattagcagcatcggctactcctataccatcccctgatctcaaaacttgtggtagagccaccatatcggatggtccactagtaccctatacttgttgcccccctcctatgccaactaactttgacaccattccatattacaagttcccttctatgactaaactccgtatccgtcccctgctcatgctgttgatgaggagtatattgctaagtataatttggccataagtcgaatgaaagatcttgataagacagaccctttaaaccctctt

SEQ ID NO: 1447 - DNA, 512 bp, Artificial
  Mutation introduced by TALE nuclease pair POT33_T01 within a POT33 allele
caagtgtgtgcaatagtagttctactactacaactctcaaaactcctttcatttcatccaatacttctttaggttccactcctaagccttttcctccatggaaaacgtaacaaaactttcaaagtctcttgcaaaagtttctaatagtggtgaccaaaaccaaaacattgaaacgaattctgttgatcgaagaaatgttcttcttggcttaggaggtctttatggtgttgctaatgctataccattagcagcatcggctactcctataccatcccctgatctcaaaacttgtggtagagccaccatatcggatggtccactagtaccctatacttgttgccccctcctatgccaactaactttgacaccattccatattacaagttcccttctatgactaaactccgtatccgtcccctgctcatgctgttgatgaggagtatattgctaagtataatttggccataagtcgaatgaaagatcttgataagacagaccctttaaaccctctt

SEQ ID NO: 1448 - DNA, 511 bp, Artificial
  Mutation introduced by TALE nuclease pair POT33_T01 within a POT33 allele
caagtgtgtgcaatagtagttctactactacaactctcaaaactcctttcatttcatccaatacttctttaggttccactcctaactttcctccatggaaaaacgtaacaaaactttcaaagtctcttgcaaaagtttctaatagtggtgaccaaaaccaaaacattgaaacgaattctgttgatcgaagaaatgttcttcttggcttaggaggtctttatggtgttgctaatgctataccattagcagcatcggctactcctataccatcccctgatctcaaaacttgtggtagagccaccatatcggatggtccactagtaccctatacttgttgccccctcctatgccaactaactttgacaccattccatattacaagttcccttctatgactaaactccgtatccgtcccctgctcatgctgttgatgagggagtatattgctaagtataatttggccataagtcgaatgaaagatcttgataagacagaccctttaaaccctctt

SEQ ID NO: 1449 - DNA, 517 bp, Artificial
  Mutation introduced by TALE nuclease pair POT33_T01 within a POT33 allele
caagtgtgtgcaatagtagttctactactacaactctcaaaactcctttcatttcatccaatacttctttaggttccactcctaagccctcttttcctccatggaaaacgtaacaaaactttcaagtctcttgcaaagtttctaatagtggtgaccaaaaccaaaacattgaaacgaattctgttgatcgaagaaatgttcttcttggcttaggaggtctttatggtgttgctaatgctataccattagcagcatcggctactcctataccatcccctgatctcaaaacttgtggtagagccaccatatcggatggtccactagtaccctattacttgtttgccccctcctatgccaactaactttgacaccattccaatattacaagttcccttctatgactaaactccgtatccgtcccctgctcatgctgttgatgaggagtatagttgctaagtataatttggccataagtcgaatgaaagatcttgataagacagaccctttaaaccctctt

SEQ ID NO: 1450 - DNA, 514 bp, Artificial
  Mutation introduced by TALE nuclease pair POT33_T01 within a POT33 allele
caagtgtgtgcaatagtagttctactactacaactctcaaaactcctttcatttcatccaatacttctttaggttccactcctaagcccttttcctccatggaaaacgtaacaaaactttcaaagtctcttgcaaaagtttctaatagtggtgaccaaaaccaaaacattgaaacgaattctgttgatcgaagaaatgttcttcttggcttaggaggtctttatggtgttgctaatgctataccattagcagcatcggctactcctataccatcccctgatctcaaaacttgtggtagagccaccatatcggatggtccactagtaccctatacttgttgccccctcctatgccaactaactttgacaccattccatattacaagttcccttctatgactaaactccgtatccgtccccctgctcatgctgttgatgaggagtatattgctaagtataatttggccataagtcgaatgaaagatcttgataagacagaccctttaaaccctctt

SEQ ID NO: 1451 - DNA, 507 bp, Artificial
  Mutation introduced by TALE nuclease pair POT33_T01 within a POT33 allele
caagtgtgtgcaatagtagttctactactacaactctcaaaactcctttcatttcatccaatacttctttaggttccactcctaagttcctccatggaaaacgtaacaaaactttcaaagtctcttgcaaagtttctaatagtggtgaccaaaaccaaaacattgaaacgaattctgttgatcgaagaaatgttcttcttggcttaggaggtctttatggtgttgctaatgctataccattagcagcatcggctactcctataccatcccctgatctcaaaacttgtggtagagccaccatatcggatggtccactagtaccctatacttgttgccccctcctatgccaactaactttgacaccattccatattacaagttcccttctatgactaaactccgtatccgtcccctgctcatgctattgatgaggagtatattgctaagtataatttggccataagtcgaatgaaagatcttgataagacagaccctttaaaccctctt

SEQ ID NO: 1452 - DNA, 514 bp, Artificial
  Mutation introduced by TALE nuclease pair POT33_T01 within a POT33 allele
caagtgtgtgcaatagtagttctactactacaactctcaaaactcctttcatttcatccaatacttctttaggttccactcctaagccctctttcctccatggaaaacgtaacaaaactttcaaagtctcttgcaaagtttctaatagtggtgaccaaaaccaaaacattgaaacgaattctgttgatcgaagaaatgttcttcttggcttaggaggtctttatggtgttgctaatgctataccattagcagcatcggctactcctataccatcccctgatctcaaaacttgtggtagagccaccatatcggatggtccactagtaccctatacttgttgccccactcctatgccaactaactttgacaccattccatattacaagttcccttctatgactaaactccgtatccgtcccctgctcatgctgttgatgaggagtatattgctaagtataatttggccataagtcgaatgaaagatcttgataagacagaccctttaaaccctctt

SEQ ID NO: 1453 - DNA, 501 bp, Artificial
  Mutation introduced by TALE nuclease pair POT33_T01 within a POT33 allele
caagtgtgtgcaatagtagttctactactacaactctcaaaactcctttcatttcatccaatacttctttaggttccactcctaagccctcttttcctccatggaaaacgtaacaaaactttcaagtctcttgcaaagtttctaatagtggtgaccaaaaccaaaacattgaaacgaattctgttgatcgaagaaatgttcttcttggcttaggaggtctttatggtgttgctaatgctataccattagcagcatcggctactcctataccatcccctgatctcaaaacttgtggtagagccaccatatcgggatggtccactagtaccctatacttgttgccccctcctatgccaactaactttgacaccattccatattacaagttcccttctatgactaaactccgtatccgtcccctgctcatgctgttgatgaggagtatattgctaagtataatttggccataagtcgaatgaaagatcttgataagacagaccc

SEQ ID NO: 1454 - DNA, 511 bp, Artificial
  Mutation introduced by TALE nuclease pair POT33_T01 within a POT33 allele
caagtgtgtgcaatagtagttctactactacaactctcaaaactcctttcatttcatccaatacttctttaggttccactcctaagcccttcctccatggaaaacgtaacaaaacttcaaagtctcttgcaaaagtttctaatagtggtgaccaaaaccaaaacattgaaacgaattctgttgatcgaagaaatgttcttcttggcttaggaggtctttatggtgttgctaatgctataccattagcagcatcggctactcctataccatcccctgatctcaaaacttgtggtagagccaccatatcggatggtccactagtaccctatacttgttgcccccctcctatgccaactaactttgacaccattccatattacaagttcccttctatgactaaactccgtatccgtcccctgctcatgctgttgatgaggagtatattgctaagtataatttggccataagtcgaatgaaagatcttgataagacagaccctttaaaccctctt

SEQ ID NO: 1455 - DNA, 515 bp, Artificial
  Mutation introduced by TALE nuclease pair POT33_T01 within a POT33 allele
caagtgtgtgcaatagtagttctactactacaactctcaaaactcctttcatttcatccaatacttctttaggttccactcctaagccctaattcctccatggaaaacgtaacaaaactttcaaagtctcttgcaaaagtttctaatagtggtgaccaaaaccaaaacattgaaacgaattctgttgatcgaagaaatgttcttcttggcttaggaggtctttatggtgttgctaatgctataccattagcagcatcggctactcctataccatcccctgatctcaaaacttgtggtagagccaccatatcggatggtccactagtaccctatacttgttgccccctcctatgccaactaactttgacaccattccatattacaagttcccttctatgactaaactccgtatccgtccccctgctcatgctgttgatgaggagtatattgctaagtataatttggccataagtcgaatgaaagatcttgataagacagaccctttaaaccctctt

SEQ ID NO: 1456 - DNA, 514 bp, Artificial
  Mutation introduced by TALE nuclease pair POT33_T01 within a POT33 allele
caagtgtgtgcaatagtagttctactactacaactctcaaaactcctttcatttcatccaatacttctttaggttccactcctaagccctaattcctccatggaaaacgtaacaaaactttcaaagtctcttgcaaaagtttctaatagtggtgaccaaaaccaaaacattgaaacgaattctgttgatcgaagaaatgttcttcttggcttaggaggtctttatggtgttgctaatgctataccattagcagcatcggctactcctataccatcccctgatctcaaaacttgtggtagagccaccatatcggatggtccactagtaccctatacttgttgccccctcctatgccaactaactttgacaccattccatattacaagttcccttctatgactaaactccgtatccgtcccctgctcatgctgttgatgaggagtatattgctaagtataatttggccataagtcgaatgaaagatcttgataagacagaccctttaaaccctctt

SEQ ID NO: 1457 - DNA, 514 bp, Artificial
  Mutation introduced by TALE nuclease pair POT33_T01 within a POT33 allele
caagtgtgtgcaatagtagttctactactacaactctcaaaactcctttcatttcatccaatacttctttaggttccactcctaagcccttttcctccatggaaaacgtaacaaaactttcaaagtctcttgcaaagtttctaatagtggtgaccaaaaccaaaacattgaaacgaattctgttgatcgaagaaatgttcttcttggcttaggaggtctttatggtgttgctaatgctataccattagcagcatcggctactcctataccatcccctgatctcaaaacttgtggtagagccaccatatcggatggtccactagtaccctatacttgttgcccccctcctatgccaactaactttgacaccattccatattacaagttcccttctatgactaaactccgtatccgtccccctgctcatgctgttgatgaggagtatattgctaagtataatttggccataagtcgaatgaaagatcttgataagacagaccctttaaaccctctt

SEQ ID NO: 1458 - DNA, 511 bp, Artificial
  Mutation introduced by TALE nuclease pair POT33_T01 within a POT33 allele
caagtgtgtgcaatagtagttctactactacaactctcaaaactcctttcatttcatccaatacttctttaggttccactcctaagccctctcctccatggaaaacgtaacaaaactttcaaagtctcttgcaaagtttctaatagtggtgaccaaaaccaaaacattgaaacgaattctgttgatcgaagaaatgttcttcttggcttaggaggtctttatggtgttgctaatgctataccattagcagcatcggctactcctataccatcccctgatctcaaaacttgtggtagagacaccatatcggatggtccactagtaccctatacttgttgccccctcctatgccaactaactttgacaccattccatattacaagttcccttctatgactaaactccgtatccgtcccctgctcatgctgttgatgaggagtatattgctaagtataatttggccataagtcgaatgaaagatcttgataagacagaccctttaaaccctctt

SEQ ID NO: 1459 - DNA, 507 bp, Artificial
  Mutation introduced by TALE nuclease pair POT33_T01 within a POT33 allele
caagtgtgtgcaatagtagttctactactacaactctcaaaactcctttcatttcatccaatacttctttaggttccactcctaagccctctttcctccatggaaaacgtaacaaaactttcaaagtctcttgcaaaagtttctaatagtggtgaccaaaaccaaaacattgaaacgaattctgttgatcgaagaaatgttcttcttggcttaggaggtctttatggtgttgctaatgctataccattagcagcatcggctactcctataccatcccctgatctcaaaacttgtggtagagccaccatatcggatggtccactagtaccctatacttgttgcccccctcctatgccaactaactttgacaccattccatattacaagttcccttctatgactaaactccgtatccgtccccctgctcatgctgttgatgaggagtatattgctaagtataatttggccataagtcgaatgaaagatcttgataacgacagacccttt

SEQ ID NO: 1460 - DNA, 515 bp, Artificial
  Mutation introduced by TALE nuclease pair POT33_T01 within a POT33 allele
  misc_feature (127); (151): n is a or c or t or g
caagtgtgtgcaatagtagttctactactacaactctcaaaactcctttcatttcatccaatacttctttaggttccactcctaagcccttttcctccatggaaaaacgtaacaaaactttcaaagnctcttgcaaaagttttctaatagnggtgaccaaaaccaaaacttgaaacgaattctgttgatcgaagaaatgttcttcttggcttaggaggtctttatggtgttgctaatgctataccattagcagcatcggctactcctataccatcccctgatctcaaaacttgtggtagagccaccatatcggatggtccactagtaccctatacttgttgccccctcctatgccaactaactttgacaccattccatattacaagttcccttctatgactaaactccgtatccgtccccctgctcatgctgttgatgaggagtatattgctaagtataatttggccataagtcgaatgaaagatcttgataagacagaccctttaaaccctctt

SEQ ID NO: 1461 - DNA, 514 bp, Artificial
  Mutation introduced by TALE nuclease pair POT33_T01 within a POT33 allele
caagtgtgtgcaatagtagttctactactacaactctcaaaactcctttcatttcatccaatacttctttaggttccactcctaagccctaattcctccatggaaaacgtaacaaaactttcaaagtctcttgcaaagtttctaatagtggtgaccaaaaccaaaacattgaaacgaattctgttgatcgaagaaatgttcttcttggcttaggaggtctttatggtgttgctaatgctataccattagcagcatcggctactcctataccatcccctgatctcaaaacttgtggtagagccaccatatcggatggtccactagtaccctatacttgttgcccccctcctatgccaactaactttgacaccattccatattacaagttcccttctatgactaaactccgtatccgtcccctgctcatgctgttgatgaggagtatattgctaagtataatttggccataagtcgaatgaaagatcttgataagacagaccctttaaaccctctt

SEQ ID NO: 1462 - DNA, 521 bp, Artificial
  Mutation introduced by TALE nuclease pair POT33_T01 within a POT33 allele
caagtgtgtgcaatagtagttctactactacaactctcaaaactcctttcatttcatccaatacttctttaggttccactcctaagccctcttcctccatggaaaacgtaacaaaactttcaaagtctcttgcaaagtttctaatagtggtgaccaaaaccaaaacattgaaacgaattctgttgatcgaagaaatgttcttcttggcttaggaggtctttatggtgttgctaatgctataccattagcagcatcggctactcctataccatcccctgatctcaaaacttgtggtagagccaccatatcggatggtccactagtaccctatactttgttgccccccctcctatgccaaactaaactttgacaccattccatattacaagttcccttctatgactaaaactccgtatccgtcccccctgctcatgctgttgatgaggagtatattgctaagtataaatttggccataagtcgaatgaaagatcttgataagacagaccctttaaaccctctt

SEQ ID NO: 1463 - DNA, 515 bp, Artificial
  Mutation introduced by TALE nuclease pair POT33_T01 within a POT33 allele
caagtgtgtgcaatagtagttctactactacaactctcaaaactcctttcatttcatccaatacttctttaggttccactcctaagccctaattcctccatggaaaacgtaacaaaactttcaaagtctcttgcaaaagtttctaatagtggtgaccaaaaccaaaacattgaaacgaattctgttgatcgaagaaatgttcttcttggcttaggaggtctttatggtgttgctaatgctataccattagcagcatcggctactcctataccatcccctgatctcaaaacttgtggtagagccaccatatcggatggtccactagtaccctatacttgttgccccctcctatgccaactaactttgacaccattccatattacaagttcccttctatgactaaactccgtatccgtcccctgctcatgctgttgatgaggagtatattgctaagtataattttggccataagtcgaatgaaagatcttgataagacagaccctttaaaccctctt

SEQ ID NO: 1464 - DNA, 483 bp, Artificial
  Mutation introduced by TALE nuclease pair POT33_T01 within a POT33 allele
caagtgtgtgcaatagtagttctactactacaactctcaaaactcctttcatttcatccaatacttctttaggttccactcctaagccctctcttcctccatggaaaacgtaacaaaagctttcaaagtctcttgcaaagtttctaatagtggtgaccaaaaccaaaacattgaaacgaattctgttgatcgaagaaatgttcttcttggcttaggaggtctttatggtgttgctaatgctataccattagcagcatcggctactcctataccatcccctgatctcaaaatcttgtggtagagccaccatatcggatggtccactagtaccctatacttgttgcccccatcctatgccaaactaactttgacaccattccatattacaagttcccttctatgactaaagctccgtatccgtccccgtgctcatgctgttgatgaggagtatattgctaagtataatttcggccataagtcgaa

SEQ ID NO: 1465 - DNA, 513 bp, Artificial
  Mutation introduced by TALE nuclease pair POT33_T01 within a POT33 allele
caagtgtgtgcaatagtagttctactactacaactctcaaaactcctttcatttcatccaatacttctttaggttccactcctaagccctcttcctccatggaaaacgtaacaaaactttcaaagtctcttgcaaagtttctaatagtggtgaccaaaaccaaaacattgaaacgaattctgttgatcgaagaaatgttcttcttggcttaggaggtctttatggtgttgctaatgctataccattagcagcatcggctactcctataccatcccctgatctcaaaacttgtggtagagccaccatatcggatggtccactagtaccctatacttgttgccccctcctatgccaactaactttgacaccattccatattacaagttcccttctatgactaaactccgtatccgtccccctgctcatgctgttgatgaggagtatattgctaagtataatttggccataagtcgaatgaaagatcttgataagacagaccctttaaaccctctt

SEQ ID NO: 1466 - DNA, 474 bp, Artificial
  Mutation introduced by TALE nuclease pair POT33_T01 within a POT33 allele
caagtgtgtgcaatagtagttctactactacaactctcaaaactcctttcatttcatccaatacttctttaggttccactcctaagccctctgtctcttgcaaagtttctaatagtggtgaccaaaaccaaaacattgaaacgaattctgttgatcgaagaaatgttcttcttggcttaggaggtctttatggtgttgctaatgctataccattagcagcatcggctactcctataccatcccctgatctcaaaacttgtggtagagccaccatatcggatggtccactagtaccctatacttgttgcccccctcctatgccaactaactttgacaccattccatattacaagttcccttctatgactaaactccgtatccgtcccctgctcatgctgttgatgaggagtatattgctaagtataatttggccataagtcgaatgaaagatcttgataagacagaccctttaaa

SEQ ID NO: 1467 - DNA, 435 bp, Artificial
  Mutation introduced by TALE nuclease pair POT33_T01 within a POT33 allele
caagtgtgtgcaatagtagttctactactacaactctcaaaactcctttcatttcatccaatacttctttaggttccactcctaaagccctctttcctccatggaaaacgtaacaaaactttcaaagtctcttgcaaaagtttctaatagtggtgaccaaaaccaaaacattgaaacgaattctgttgatcgaagaaatgttcttcttggcttaggaggtctttatggtgttgctaatgctataccattagcagcatcggctactcctataccatcccctgatctcaaaatcttgtggtagagccaccatatcggatggtccactagtaccctatacttgttgcccccatcctatgccaactaactttgacaccattccatattacaagttcccttctatgactaaactccgtatccgtccccgtgctcatgctg

SEQ ID NO: 1468 - DNA, 516 bp, Artificial
  Mutation introduced by TALE nuclease pair POT33_T01 within a POT33 allele
caagtgtgtgcaatagtagttctactactacaactctcaaaactcctttcatttcatccaatacttctttaggttccactcctaagccctcttcctccatggaaaacgtaacaaaactttcaaagtctcttgcaaagtttctaatagtggtgaccaaaaccaaaacattgaaacgaattctgttgatcgaagaaatgttcttcttggcttaggaggtctttatggtgttgctaatgctataccattagcagcatcggctactcctataccatcccctgatctcaaaacttgtggtagagccaccatatcggatggtccactagtaccctatacttgttgcccccctcctatgccaaactaactttgacaccattccatattacaagttcccttctatgactaaactccgtatccgtcccctgctcatgctgttgatgaggagtatattgctaagtataatttggccataagtcgaatgaaaagatcttgataagacagaccctttaaaaccctctt

SEQ ID NO: 1469 - DNA, 518 bp, Artificial
  Mutation introduced by TALE nuclease pair POT33_T01 within a POT33 allele
caagtgtgtgcaatagtagttctactactacaactctcaaaactcctttcatttcatccaatacttctttaaggttcctactccataagccctctcttcctccatggaaaacgtaacaaaactttcaaagtctcattgcaaagtttctaatagtggtgaccaaaaccaaaacattgaaacgaattctgttgatcgaagaaatgttcttcttggcttaggaggtctttatggtgttgctaatgctataccattagcagcatcggctactcctataccatcccctgatctcaaaacttgtggtagagccaccatatcggatggtccactagtaccctatacttgttgccccctcctatgccaactaactttgacaccattccatattacaagttcccttctatgactaaactccgtatccgtcccctgctcatgctgttgatgaggagtatattgctaagtataatttggccataagtcgaatgaaagatcttgataagacagaccctttaaaccctctt

SEQ ID NO: 1470 - DNA, 516 bp, Artificial
  Mutation introduced by TALE nuclease pair POT33_T01 within a POT33 allele
caagtgtgtgcaatagtagttctactactacaactctcaaaactcctttcatttcatccaatacttctttaggttccactcctaagccctctttcctccatggaaaacgtaacaaaactttcaaagtctcttgcaaaagtttctaatagtggtgaccaaaaccaaaacattgaaacgaattctgttgatcgaagaaatgttcttcttggcttaggaggtctttatggtgttgctaatgctataccattagcagcatcggctactcctataccatcccctgatctcaaaacttgtggtagagccaccatatcggatggtccactagtaccctatacttgttgccccctcctatgccaactaactttgacaccattccatattacaagttcccttctatgactaaactccgtatccgtccccctgctcatgctgtttgatgaggagtatattgctaagtataatttggccataagtcgaatgaaagatcttgataagacagaccctttaaaccctctt

SEQ ID NO: 1471 - DNA, 516 bp, Artificial
  Mutation introduced by TALE nuclease pair POT33_T01 within a POT33 allele
caagtgtgtgcaatagtagttctactactacaactctcaaaactcctttcatttcatccaatacttctttaggttccactcctaagcttttcctccatggaaaacgtaacaaaactttcaaagtctcttgcaaagtttctaatagtggtgaccaaaaccaaaacattgaaacgaattctgttgatcgaagaaatgttcttcttggcttaggaggtctttatggtgttgctaatgctataccattagcagcatcggctactcctataccatcccctgatctcaaaacttgtggtagagccaccatcatcggatggtccactagtaccctatacttgttgcccccctcctatgccaactaactttgacaccattccatattacaaagttccctttctatgactaaactccgtatccgtcccctgctcatgctgttgatgaggagtatattgcctaagtataattttggccataagtcgaatgaaagatcttgataagacagaccctttaaaccctctt

SEQ ID NO: 1472 - DNA, 511 bp, Artificial
  Mutation introduced by TALE nuclease pair POT33_T01 within a POT33 allele
caagtgtgtgcaatagtagttctactactacaactctcaaaactcctttcatttcatccaatacttctttaggttccactcctaagccctctctccatggaaaacgtaacaaaactttcaaagtctcttgcaaagtttctaatagtggtgaccaaaaccaaaacattgaaacgaattctgttgatcgaagaaatgttcttcttggcttaggaggtctttatggtgttgctaatgctataccattagcagcatcggctactcctataccacccctgcatctcaaacattgtggtagagccaccatatcggatggtccactagtaccctatacttgttgccccctcctatgccaactaactttgacaccattccatattacaagttcccttctatgactaaactccgtatccgtccccctgctcatgctgttgatgaggagtatattgctaagtataatttggccataagtcgaatgaaagatcttgataagacagaccctttaaaccctctt

SEQ ID NO: 1473 - DNA, 513 bp, Artificial
  Mutation introduced by TALE nuclease pair POT33_T01 within a POT33 allele
caagtgtgtgcaatagtagttctactactacaactctcaaaactcctttcatttcatccaatacttctttaggttccactcctaagccctcttttcctccatggaaaacgtaacaaaactttcaagtctcttgcaaagtttctaatagtggtgaccaaaaccaaaacattgaaacgaattctgttgatcgaagaaatgttcttcttggcttaggaggtctttatggtgttgctaatgctataccattagcagcatcggctactcctataccatcccctgatctcaaaacttgtggtagagccaccatatcggatggtccactagtaccctatacttgttgccccctcctatgccaactaactttgacaccattccatattacaagttcccttctatgactaaactccgtatccgtcccctgctcatgctgttgatgaggagtatattgctaagtataatttggccataagtcgaatgaaagatcttgataagacagaccctttaaaccctctt

SEQ ID NO: 1474 - DNA, 515 bp, Artificial
  Mutation introduced by TALE nuclease pair POT33_T01 within a POT33 allele
caagtgtgtgcaatagtagttctactactacaactctcaaaactcctttcatttcatccaatacttctttaggttccactcctaaagccctcttttcctccatggaaaacgtaacaaaactttcaagtctcttgcaaagtttctaatagtggtgaccaaaaccaaaacattgaaacgaattctgttgatcgaagaaatgttcttcttggcttaggaggtctttatggtgttgctaatgctataccattagcagcatcggctactcctataccatcccctgatctcaaaacttgtggtagagccaccatatcggatggtccactagtaccctatacttgttgccccctcctatgccaactaactttgacaccattccatattacaagttcccttctatgactaaactccgtatccgtccccctgctcatgctgttgatgaggagtatattgctaagtataatttggccataagtcgaatgaaagatcttgataagacagaccctttaaaccctctt

SEQ ID NO: 1475 - DNA, 517 bp, Artificial
  Mutation introduced by TALE nuclease pair POT33_T01 within a POT33 allele
caagtgtgtgcaatagtagttctactactacaactctcaaaactcctttcatttcatccaatacttctttaggttccactcctaagccctctttcctccatggaaaacgtaacaaaactttcaaagtctcttgcaaaagtttctaatagtggtgaccaaaaccaaaacattgaaacgaattctgttgatcgaagaaatgttcttcttggcttaggaggtctttatggtgttgctaatgctataccattagcagcatcggctactcctataccatcccctgatctcaaaacttgtggtagagccaccatatcggatggtccactagtaccctatacttgttgcccccctcctatgccaactaactttgacaccattccatattacaagttcccttctatgactaaactccgtatccgtccccctgctcatgctgttgatgaggagtatattgctaagtataattttggccataagtcgaatgaaagatcttgataagacagaccctttaaaccctctt

SEQ ID NO: 1476 - DNA, 522 bp, Artificial; identical to SEQ ID NO: 1275
  Mutation introduced by TALE nuclease pair POT33_T01 within a POT33 allele
  misc_feature (90): n is a or c or t or g

SEQ ID NO: 1477 - DNA, 492 bp, Artificial
  Mutation introduced by TALE nuclease pair POT33_T01 within a POT33 allele
caagtgtgtgcaatagtagttctactactacaactctcaaaactcctttcatttcatccaatacttctttaggttccactcctaagccctctcagcaaaacaggaaggcaaaatgccgcaaaaaggggaaactttcctccatggaaaacgtaacaaaactttcaaagtctcttgcaaagtttctaatagtggtgaccaaaccaaaacattgaaacgaattctgttgatcgaagaaatgttcttcttggcttaggaggtctttatggtgttgctaatgctataccattagcagcatcggctactcctataccatccctgatctcaaacttgtggtagagccaccatatcggatggtccactagtaccctatacttgttgcccctcctcgcactgcaacttagattgcaccattccatattacaagttcccttctatgactaactccgtatccgtccctgctcatgctgttgatgaggagtatattgctaagta

SEQ ID NO: 1478 - DNA, 491 bp, Artificial
  Mutation introduced by TALE nuclease pair POT33_T01 within a POT33 allele
caagtgtgtgcaatagtagttctactactacaactctcaaaactcctttcatttcatccaatacttctttaggttccactcctaagccctcgtgtaaagcctggggtgcctaatgagtgagctaactcacattaattgcgttcctccatggaaaacgtaacaaaactttcaaagtctcttgcaaagtttctaatagtggtgaccaaaaccaaaacattgaaacgaattctgttgatcgaagaaatgttcttcttggcttaggaggtctttatggtgttgctaatgctataccattagcagcatcggctactcctataccatcccctgatctcaaaacttgtggtagagccaccatatcggatggtccactagtaccctatacttgttgcccctcctatgccaactaaactttgatcaccattccatcattacaagttcccttctatcgactaaactccgtatccgtcccctgctccatgctgttgatgagg

SEQ ID NO: 1479 - DNA, 503 bp, Artificial
  Mutation introduced by TALE nuclease pair POT33_T01 within a POT33 allele
caagtgtgtgcaatagtagttctactactacaactctcaaaactcctttcatttcatccaatacttctttaggttccactcctaagccctcgtgtaaagcctggggtgcctaatgagtgagctaactcacattaattgcgttcctccatggaaaacgtaacaaaactttcaaagtctcttgcaaagtttctaatagtggtgaccaaaaccaaaacattgaaacgaattctgttgatcgaagaaatgttcttcttggcttaggaggtctttatggtgttgctaatgctataccattagcagcatcggctactcctataccatcccctgatctcaaaacttgtggtagagccaccatatcggatggtccactagtaccctatacttgttgcccctcctatgccaactaactttgacaccattccatattacaagttcccttctatgactaaactccgtatccgtcccctgctcatgctgttgatgaggagtatattgctaagtat

SEQ ID NO: 1480 - DNA, 564 bp, Artificial
  Mutation introduced by TALE nuclease pair POT33_T01 within a POT33 allele
caagtgtgtgcaatagtagttctactactacaactctcaaaactcctttcatttcatccaatacttctttaggttccactcctaagccctctcgagctatgagaaagcgccacgcttcccgaagggagaaaggcggacaggtatccggtaagcggcagggtcttttcctccatggaaaacgtaacaaaactttcaaagtctcttgcaaagtttctaatagtggtgaccaaaaccaaaacattgaaacgaattctgttgatcgaagaaatgttcttcttggcttaggaggtctttatggtgttgctaatgctataccattagcagcatcggctactcctataccatccctgatctcaaaacttgtggtagagccaccatatcggatggtccactagtaccctatacttgttgcccctcctatgccaactaactttgacaccattccatattacaagttcccttctatgactaaactccgtatccgtcccctgctcatgctgttgatgaggagtatattgctaagtataatttggccataagtcgaatgaaagatcttgataagac

SEQ ID NO: 1481 - DNA, 548 bp, Artificial
  Mutation introduced by TALE nuclease pair POT33_T01 within a POT33 allele
  misc_feature (489): n is a or c or t or g
caagtgtgtgcaatagtagttctactactacaactctcaaaactcctttcatttcatccaatacttctttaggttccactcctaagccctcgtgtaaagcctggggtgcctaatgagtgagctaactcacattaattgcgttcctccatggaaaacgtaacaaaactttcaaagtctcttgcaaagtttctaatagtggtgaccaaaaccaaaacattgaaacgaattctgttgatcgaagaaatgttcttcttggcttaggaggtctttatggtgttgctaatgctataccattagcagcatcggctactcctataccatcccctgatctcaaaacttgtggtagagccaccatatcggatggtccactagtaccctatacttgttgcccctcctatgccaactaaactttgacaccattccatattacaagttcccttctatcgactaaactccgtatccgtcccctgctcatgctgttgatgaggngtatattgctaagtaatattggccataagtcgaatgaaagatcttgataagacagaccc

SEQ ID NO: 1482 - DNA, 548 bp, Artificial
  Mutation introduced by TALE nuclease pair POT33_T01 within a POT33 allele
caagtgtgtgcaatagtagttctactactacaactctcaaaactcctttcatttcatccaatacttctttaggttccactcctaagccctctcagcaaaaacaggaaggcaaaatgccgcaaaaaggggaaacttttcctccatggaaaacgtaacaaaactttcaaagtctcttgcaaagtttctaatagtggtgaccaaaaccaaaacattgaaacgaattctgttgatcgaagaaatgttcttcttggcttaggaggtctttatggtgttgctaatgctataccattagcagcatcggctactcctataccatcccctgatctcaaaacttgtggtagagccaccatatcggatggtccactagtaccctatacttgttgccccctcctatgccaactaactttgacaccattccatattacaagttcccttctatgactaactccgtatccgtcccctgctcatgctgttgatgaggagtatattgctaagtataatttggccataagtcgaatgaaagatcttgataagacagaccctttaaa

SEQ ID NO: 1483 - DNA, 549 bp, Artificial
  Mutation introduced by TALE nuclease pair POT33_T01 within a POT33 allele
caagtgtgtgcaatagtagttctactactacaactctcaaaactcctttcatttcatccaatacttctttaggttccactcctaagccctctcagcaaaaacaggaaggcaaaatgccgcaaaaaggggaaactttcctccatggaaaacgtaacaaaactttcaaagtctcttgcaaagtttctaatagtggtgaccaaaaccaaaacattgaaacgaattctgttgatcgaagaaatgttcttcttggcttaggaggtctttatggtgttgctaatgctataccattagcagcatcggctactcctataccatcccctgatctcaaaacttgtggtagagccaccatatcggatggtccactagtaccctatacttgttgccccctcctatgccaactcaactttgacaccattccatattacaagttcccttctatgactaaactccgtatccgtcccctgctcatgctgttgatgaggagtatattgctaagtataatttggccataagtcgaatgaaagatcttgataagacagaccctttaaa

SEQ ID NO: 1484 - DNA, 500 bp, Artificial; identical to SEQ ID NO: 1358
  Mutation introduced by TALE nuclease pair POT33_T01 within a POT33 allele

SEQ ID NO: 1485 - DNA, 391 bp, Artificial
  Mutation introduced by TALE nuclease pair POT33_T01 within a POT33 allele
caagtgtgtgcaatagtagttctactactacaactctcaaaactcctttcatttcatccaatacttctttaggttccactcctaagccctcgtgtaaagcctggggtgcctaatgagtgagctaactcacattaattgcgttcctccatggaaaacgtaacaaaactttcaaagtctcttgcaaagtttctaatagtggtgaccaaaaccaaaacattgaaacgaattctgttgatcgaagaaatgttcttcttggcttaggaggtctttatggtgttgctaatgctataccattagcagcatcggctactcctataccatcccctgatctcaaacttgtggtagagccaccatatcggatggtccactagtaccctatacttgttgcccc

SEQ ID NO: 1486 - DNA, 503 bp, Artificial
  Mutation introduced by TALE nuclease pair POT33_T01 within a POT33 allele
caagtgtgtgcaatagtagttctactactacaactctcaaaactcctttcatttcatccaatacttctttaggttccactcctaagccctctcagccagcagcaacaggagaagatcaaaccgaaggttcgttcgacagtggttttcctccatggaaacgtaacaaaactttcaaagtctcttgcaaagtttctaatagtggtgaccaaaaccaaaacattgaaacgaattctgttgatcgaagaaatgttcttcttggcttaggaggtctttatggtgttgctaatgctataccattagcagcatcggctactcctataccatcccctgatctcaaaacttgtggtagagccaccatatcggatggtccactagtaccctatacttgttgccccctcctatgccaactaactttgacaccattccatattacaagttcccttctatgactaaactccgtatccgtcccctgctcatgctgttgatgaggagtatattgctaa

SEQ ID NO: 1487 - DNA, 548 bp, Artificial
  Mutation introduced by TALE nuclease pair POT33_T01 within a POT33 allele
caagtgtgtgcaatagtagttctactactacaactctcaaaactcctttcatttcatccaatacttctttaggttccactcctaagccctctcagcaaaacaggaaggcaaaatgccgcaaaaaggggaaacttttcctccatggaaaacgtaacaaaactttcaaagtctcttgcaaagtttctaatagtggtgaccaaaaccaaaacattgaaacgaattctgttgatcgaagaaatgttcttcttggcttaggaggtctttatggtgttgctaatgctataccattagcagcatcggctactcctataccatcccctgatctcaaaacttgtggtagagccaccatatcggatggtccactagtaccctatacttgttgccccctcctatgccaactaactttgacaccattccatattacaagttcccttctatgactaaactccgtatccgtcccctgctcatgctgttgatgaggagtatattgctaagtataatttggccataagtcgaatgaaagatcttgataagacagaccctttaaa

SEQ ID NO: 1488 - DNA, 521 bp, Artificial
  Mutation introduced by TALE nuclease pair POT33_T01 within a POT33 allele
caagtgtgtgcaatagtagttctactactacaactctcaaaactcctttcatttcatccaatacttctttaggttccactcctaagccctctcagcaaaacaggaaggcaaaatgccgcaaaaaggggaaacttttcctccatggaaaacgtaacaaaactttcaaagtctcttgcaaagtttctaatagtggtgaccaaaaccaaaacattgaaacgaattctgttgatcgaagaaatgttcttcttggcttaggaggtctttatggtgttgctaatgctataccattagcagcatcggctactcctataccatccctgatctcaaaacttgtggtagagccaccatatcggatggtccactagtaccctatacttgttgccccctcctatcgcaactcaactttagatcaccattccatattacaagttcccttctatgactaaactccgtatccgtcccctgctcatgctgttgatgaggagtataattgctaagtataatttggccataagtcgaat

SEQ ID NO: 1489 - DNA, 586 bp, Artificial
  Mutation introduced by TALE nuclease pair POT33_T01 within a POT33 allele
caagtgtgtgcaatagtagttctactactacaactctcaaaactcctttcatttcatccaatacttctttaggttccactcctaagccctctcggcaactatggatgaacgaaatagacagatcgctgagataggtgcctcactgattaagcattggtaactgtcagaccaatttcctccatggaaaacgtaacaaaactttcaaagtctcttgcaaagtttctaatagtggtgaccaaaaccaaaacattgaaacgaattctgttgatcgaagaaatgttcttcttggcttaggaggtctttatggtgttgctaatgctataccattagcagcatcggctactcctataccatccctgatctcaaaacttgtggtagagccaccatatcggatggtccactagtaccctatacttgttgccccctcctatgccaactaactttgacaccattccatattacaagttcccttctatgactaaactccgtatccgtcccctgctcatgctgttgatgaggagtatattgctaagtataatttggccataagtcgaatgaaagatcttgataagacagaccctttaaa

SEQ ID NO: 1490 - DNA, 521 bp, Artificial
  Mutation introduced by TALE nuclease pair POT33_T01 within a POT33 allele
caagtgtgtgcaatagtagttctactactacaactctcaaaactcctttcatttcatccaatacttctttaggttccactcctaagccctctcaatttcctttcctcatggaaaacgtaacaaaactttcaaagtctcttgcaaagtttctaatagtggtgaccaaaaccaaaacattgaaacgaattctgttgatcgaagaaatgttcttcttggcttaggaggtctttatggtgttgctaatgctataccattagcagcatcggctactcctataccatcccctgatctcaaaacttgtggtagagccaccatatcggatggtccactagtaccctatacttgttgccccctcctatgccaactaactttgacaccattccatattacaagttcccttctatgactaaactccgtatccgtcccctgctcatgctgttgatgaggagtatattgctaagtataatttggccataagtcgaatgaaagatcttgataagacagaccctttaaaccctctt

SEQ ID NO: 1491 - DNA, 562 bp, Artificial
  Mutation introduced by TALE nuclease pair POT33_T01 within a POT33 allele
  misc_feature (224): n is a or c or t or g
caagtgtgtgcaatagtagttctactactacaactctcaaaactcctttcatttcatccaatacttctttaggttccactcctaagccctctccccatccgactacggcggtgatcgtggaccaccgaaggcccatactgcccggcggctcagcgtcctcccatcggaaaatgcaagtacaaaaccaatttcaaagtctcttgcaaagtttctaatagtggtgnccaaaaccaaaacattgaaacgaattctgttgatcgaagaaatgttcttcttggcttaggaggtctttatggtgttgctaatgctataccattagcagcatcggctactcctataccatcccctgatctcaaaacttgtggtagagccaccatatcggatggtccactagtaccctatacttgttgccccctcctatgccaactaactttgacaccattccatattacaagttcccttctatcgactaaactccgtatccgtcccctgctccatgctgttgatgaggagtatattgctaagtaataatttggtccataagtcgaatgaaagatcttga

SEQ ID NO: 1492 - DNA, 505 bp, Artificial
  Mutation introduced by TALE nuclease pair POT33_T01 within a POT33 allele
caagtgtgtgcaatagtagttctactactacaactctcaaaactcctttcatttcatccaatacttctttaggttccactcctaagccctctcagccagcagcaacaggagaagatcaaaccgaaggtttcgttcgacagtggttttcctccatggaaacgtaacaaaactttcaaagtctcttgcaaagtttctaatagtggtgaccaaaaccaaaacattgaaacgaattctgttgatcgaagaaatgttcttcttggcttaggaggtctttatggtgttgctaatgctataccattagcagcatcggctactcctataccatcccctgatctcaaaacttgtggtagagccaccatatcggatggtccactagtaccctatacttgttgccccctcctatgccaactaactttgacaccattccatattacaagttcccttctatgactaaactccgtatccgtcccctgctcatgctgttgatgaggagtatattgctaag

SEQ ID NO: 1493 - DNA, 711 bp, Artificial
  Mutation introduced by TALE nuclease pair POT33_T01 within a POT33 allele
caagtgtgtgcaatagtagttctactactacaactctcaaaactcctttcatttcatccaatacttctttaggttccactcctaagccctctgtgaattcgagctcggtacctcgcgaatgcatctagatccaatgatcatgagcggagaattaagggagtcacgttatgacccccgccgatgacgcgggtgctcatcattggaaaacgttcttcggggcgaaaactctcaaggatcttaccgctgttgagatccagttcgatgtaacccactcgtgcacccaactgatccttttcctccatggaaaacgtaacaaaactttcaaagtctcttgcaaagtttctaatagtggtgaccaaaaccaaacattgaaacgattctgttgatcgaagaaatgttcttcttggcttaggaggtctttatggtgttgctaatgctataccattagcagcatcggctactcctataccatccctgatctcaaaacttgtggtagagccaccatatcggatggtccactagtaccctatacttgttgccccatcctatgccaactaactttgacaccattccatattacaaagttcccttctatgactaaactccgtatccgtcccctgctcatgctgttgatgaggagtatattgcctaagtattaatttgggccataagtcgaatgaaagatcttgataagacagaccctttaaaccc

SEQ ID NO: 1494 - DNA, 498 bp, Artificial
  Mutation introduced by TALE nuclease pair POT33_T01 within a POT33 allele
caagtgtgtgcaatagtagttctactactacaactctcaaaactcctttcatttcatccaatacttctttaggttccactcctaagccctctatagttaccggataaggcgcagcggtcgggcttcctccatggaaaacgtaacaaaactttcaaagtctcttgcaaagtttctaatagtggtgaccaaaaccaaaacattgaaacgaattctgttgatcgaagaaatgttcttcttggcttaggaggtctttatggtgttgctaatgctataccattagcagcatcggctactcctataccatcccctgatctcaaaacttgtggtagagccaccatatcggatggtccactagtaccctatacttgttgccccctcctatgccaactaactttgacaccattccatattacaagttcccttctatgactaaactccgtatccgtcccctgctcatgctgttgatgaggagtatattgctaagtataatttggccat

SEQ ID NO: 1495 - DNA, 538 bp, Artificial
  Mutation introduced by TALE nuclease pair POT33_T01 within a POT33 allele
caagtgtgtgcaatagtagttctactactacaactctcaaaactcctttcatttcatccaatacttctttaggttccactcctaagccctctcagcaaaacaggaaggcaaaatgccgcaaaaaggggaaacttttcctccatggaaaacgtaacaaaactttcaaagtctcttgcaaagtttctaatagtggtgaccaaaaccaaaacattgaaacgaattctgttgatcgaagaaatgttcttcttggcttaggaggtctttatggtgttgctaatgctataccattagcagcatcggctactcctataccatcccctgatctcaaaacttgtggtagagccaccatatcggatggtccactagtaccctatacttgttgccccctcctatgccaactaactttgacaccattccatattacaagttcccttctatgactaaactccgtatccgtcccctgctcatgctgttgatgaggagtatattgctaagtataattggccataagtcgaatgaaagatcttgataagacaga

SEQ ID NO: 1496 - DNA, 572 bp, Artificial
  Mutation introduced by TALE nuclease pair POT33_T01 within a POT33 allele
caagtgtgtgcaatagtagttctactactacaactctcaaaactcctttcatttcatccaatacttctttaggttccactcctaagccctctcaggagaaccagaccaggaacaagcacatcaaccccaacgagtggtggaaggtgtacgagatcgcccggaacagcacccaggaccgtagccgtgggcctggcacagcaccggcaacagcgcctgcaccgtctccagcgcctgcttgccaccaacttttcctccatggaaaacgtaacaaaactttcaaagtctcttgcaaagtttctaatagtggtgaccaaaaccaaaacttgaaacgaattctgttgatcgaagaaatgtcttcttggcttaggaggtctttatggtgttgctaatgctataccattagcagcatcggctactcctataccatcccctgatctcaaaacttgtggtagagccaccatatcggatggtccactagtaccctatacttgttgcccctcctatgccaactaactttgacaccattccatattacaagttcccttctatgactaaactccgtatccgtcccc

SEQ ID NO: 1497 - DNA, 539 bp, Artificial
  Mutation introduced by TALE nuclease pair POT33_T01 within a POT33 allele
caagtgtgtgcaatagtagttctactactacaactctcaaaactcctttcatttcatccaatacttctttaggttccactcctaagccctctcagcaaaaacaggaaggcaaaatgccgcaaaaaaggggaaacttttcctccatggaaaacgtaacaaaactttcaaagtctcttgcaaagtttctaatagtggtgaccaaaaccaaaacattgaaacgaattctgttgatcgaagaaatgttcttcttggcttaggaggtctttatggtgttgctaatgctataccattagcagcatcggctactcctataccatcccctgatctcaaaacttgtggtagagccaccatatcggatggtccactagtaccctatacttgttgccccctcctatgccaactaactttgacaccattccatattacaagttcccttctatgactaaactccgtatccgtcccctgctcatgctgttgatgaggagtatattgctaagtataattggcataagtcgaatgaaagatcttgataagacaga

SEQ ID NO: 1498 - DNA, 422 bp, Artificial
  Mutation introduced by TALE nuclease pair POT33_T01 within a POT33 allele
caagtgtgtgcaatagtagttctactactacaactctcaaaactcctttcatttcatccaatacttctttaggttccactcctaagccctcttcttgagatccttttttctgcgcgtaatctgctgcttgcaaacaaaaaaccaccgctaccaactttcctccatggaaaacgtaacaaactttcaagtctcttgcaaagtttctaatagtggtgaccaaaaccaaaacattgaaacgaattctgttgatcgaagaaatgttcttcttggcttaggaggtctttatggtgttgctaatgctataccattagcagcatcggctactcctataccatccctgatctcaaaacttgtggtagagccaccattatcggatggtccactagtaccctatacttgttgcccctcctatgccaactaac

SEQ ID NO: 1499 - DNA, 562 bp, Artificial
  Mutation introduced by TALE nuclease pair POT33_T01 within a POT33 allele
caagtgtgtgcaatagtagttctactactacaactctcaaaactcctttcatttcatccaatacttctttaggttccactcctaagccctctcgctacaatttgctaaagctttatgctatttgggagcaagcatcaacttaattccccttttcctccatggaaaacgtaacaaaactttcaaagtctcttgcaaagtttctaatagtggtgaccaaaaccaaaacattgaaacgaattctgttgatcgaagaaatgttcttcttggcttaggaggtctttatggtgttgctaatgctataccattagcagcatcggctactcctataccatcccctgatctcaaaacttgtggtagagccaccatatcggatggtccactagtaccctatacttgttgccccctcctatgccaactaactttgacaccattccatattacaagttcccttctatgactaaactccgtatccgtcccctgctcatgctgttgatgaggagtatattgctaagtataatttggccataagtcgaatgaaagatcttgataagacagacccttt

SEQ ID NO: 1500 - DNA, 388 bp, Artificial
  Mutation introduced by TALE nuclease pair POT33_T01 within a POT33 allele
caagtgtgtgcaatagtagttctactactacaactctcaaaactcctttcatttcatccaatacttctttaggttccactcctaagccctcgtgtaaagcctggggtgcctaatgagtgagctaactcacattaattgcgttcctccatggaaaacgtaacaaaactttcaaagtctcttgcaaagtttctaatagtggtgaccaaaaccaaaacattgaaacgaattctgttgatcgaagaaatgttcttcttggcttaggaggtctttatggtgttgctaatgctataccattagcagcatcggctactcctataccatcccctgatctcaaaacttgtggtagagccaccatatcggatggtccactagtaccctatacttgttg

SEQ ID NO: 1501 - DNA, 525 bp, Artificial
  Mutation introduced by TALE nuclease pair POT33_T01 within a POT33 allele
caagtgtgtgcaatagtagttctactactacaactctcaaaactcctttcatttcatccaatacttctttaggttccactcctaagccctcgcgcacatcgttgcgttaagccaacacccggcagcgttaggggaccgtcgctgtcaagtatcaggacatgatcgcagcgttgccagaggcgacacacgaagcgatcgtcaacttttcctccatggaaaacgtaacaaaactttcaaagtctcttgcaaagtttctaatagtggtgaccaaaaccaaaacattgaaacgaattctgttgatcgaagaaatgttcttcttggcttaggaggtctttatggtgttgctaatgctataccattagcagcatcggctactcctataccatcccctgatctcaaaacttgtggtagagccaccatatcggatggtccactagtaccctatacttgttgcccctcctatgccaactaactttgacaccattccatattacaagttcccttctatgactaaactccgtatcc

SEQ ID NO: 1502 - DNA, 544 bp, Artificial
  Mutation introduced by TALE nuclease pair POT33_T01 within a POT33 allele
caagtgtgtgcaatagtagttctactactacaactctcaaaactcctttcatttcatccaatacttctttaggttccactcctaagccctctatagttaccggataaggcgcagcggtcgggcttcctccatggaaaacgtaacaaaactttcaaagtctcttgcaaagtttctaatagtggtgaccaaaaccaaaacattgaaacgaattctgttgatcgaagaaatgttcttcttggcttaggaggtctttatggtgttgctaatgctataccattagcagcatcggctactcctataccatcccctgatctcaaaacttgtggtagagccaccatatcggatggtccactagtaccctatacttgttgccccctcctatgccaactaactttgacaccattccatattacaagttcccttctatgactaaactcgtatccgtcccctgctcatgctgttgatgaggagtatattgctaagtataatttggccatagtcgaatgaaagatcttgataagacagaccctttaaaccctcttgg

SEQ ID NO: 1503 - DNA, 545 bp, Artificial
  Mutation introduced by TALE nuclease pair POT33_T01 within a POT33 allele
caagtgtgtgcaatagtagttctactactacaactctcaaaactcctttcatttcatccaatacttctttaggttccactcctaagccctctcagcaaaacaggaaggcaaaatgccgcaaaaaggggaaacttttcctccatggaaaacgtaacaaaactttcaaagtctcttgcaaagtttctaatagtggtgaccaaaaccaaaacattgaaacgaattctgttgatcgaagaaatgttcttcttggcttaggaggtctttatggtgttgctaatgctataccattagcagcatcggctactcctataccatcccctgatctcaaaacttgtggtagagccaccatatcggatggtccactagtaccctatacttgttgccccctcctatgccaactaactttgacaccattccatattacaagttcccttctatgactaactccgtatccgtcccctgctcatgctgttgatgaggagtatattgctaagtataattggccataagtcgaatgaagatcttgataagacagaccctttaaa

SEQ ID NO: 1504 - DNA, 499 bp, Artificial
  Mutation introduced by TALE nuclease pair POT33_T01 within a POT33 allele
caagtgtgtgcaatagtagttctactactacaactctcaaaactcctttcatttcatccaatacttctttaggttccactcctaagccctctcagccagcagcaacaggagaagatcaaaccgaaggttcgttcgacagtggttttcctccatggaaacgtaacaaaactttcaaagtctcttgcaaagtttctaatagtggtgaccaaaaccaaaacattgaaacgaattctgttgatcgaagaaatgttcttcttggcttaggaggtctttatggtgttgctaatgctataccattagcagcatcggctactcctataccatcccctgatctcaaaacttgtggtagagccaccatatcggatggtccactagtaccctatacttgttgccccctcctatgccaactaactttgacaccattccatattacaagttcccttctatgactaaactccgtatccgtcccctgctcatgctgttgatgaggagtatattg

SEQ ID NO: 1505 - DNA, 528 bp, Artificial
  Mutation introduced by TALE nuclease pair POT33_T01 within a POT33 allele
caagtgtgtgcaatagtagttctactactacaactctcaaaactcctttcatttcatccaatacttctttaggttccactcctaagccctctatagttaccggataaggcgcagcggtcggggcttcctccatggaaaacgtaacaaaactttcaaagtctcttgcaaagtttctaatagtggtgaccaaaaccaaaacattgaaacgaattctgttgatcgaagaaatgttcttcttggcttaggaggtctttatggtgttgctaatgctataccattagcagcatcggctactcctataccatcccctgatctcaaaacttgtggtagagccaccatatcggatggtccactagtaccctatacttgttgccccctcctatgccaactaactttgacaccattccatattacaagttcccttctatgactaaactcgtatccgtcccctgctcatgctgttgatgaggagtatattgctaagtataatttggccataagtcgaatgaaagatcttgataagacaga

SEQ ID NO: 1506 - DNA, 550 bp, Artificial
  Mutation introduced by TALE nuclease pair POT33_T01 within a POT33 allele
caagtgtgtgcaatagtagttctactactacaactctcaaaactcctttcatttcatccaatacttctttaggttccactcctaagccctctcagcaaaaacaggaaggcaaaatgccgcaaaaaaggggaaacttttcctccatggaaaacgtaacaaaactttcaaagtctcttgcaaagtttctaatagtggtgaccaaaaccaaaacattgaaacgaattctgttgatcgaagaaatgttcttcttggcttaggaggtctttatggtgttgctaatgctataccattagcagcatcggctactcctataccatcccctgatctcaaaacttgtggtagagccaccatatcggatggtccactagtaccctatacttgttgccccctcctatgccaactaactttgacaccattccatattacaagttcccttctatgactaaactccgtatccgtcccctgctcatgctgttgatgaggagtatattgctaagtataatttggccataagtcgaatgaaagatcttgataagacagaccctttaaa

SEQ ID NO: 1507 - DNA, 507 bp, Artificial
  Mutation introduced by TALE nuclease pair POT33_T01 within a POT33 allele
caagtgtgtgcaatagtagttctactactacaactctcaaaactcctttcatttcatccaatacttctttaggttccactcctaagccctctatagttaccggataaggcgcagcggtcgggcttcctccatggaaaacgtaacaaaactttcaaagtctcttgcaaagtttctaatagtggtgaccaaaaccaaaacattgaaacgaattctgttgatcgaagaaatgttcttcttggcttaggaggtctttatggtgttgctaatgctataccattagcagcatcggctactcctataccatcccctgatctcaaaacttgtggtagagccaccatatcggatggtccactagtaccctatacttgttgcccctcctatgccaactaactttgacaccattccatattacaagttcccttctatgactaaactccgtatccgtcccctgctcatgctgttgatgaggagtatattgctaagtataatttggccataagtcgaatg

SEQ ID NO: 1508 - DNA, 541 bp, Artificial
  Mutation introduced by TALE nuclease pair POT33_T01 within a POT33 allele
caagtgtgtgcaatagtagttctactactacaactctcaaaactcctttcatttcatccaatacttctttaggttccactcctaagccctctcagcaaaaacaggaaggcaaaatgccgcaaaaaaggggaaacttttcctccatggaaaacgtaacaaaactttcaaagtctcttgcaaagtttctaatagtggtgaccaaaaccaaaacattgaaacgaattctgttgatcgaagaaatgttcttcttggcttaggaggtctttatggtgttgctaatgctataccattagcagcatcggctactcctataccatcccctgatctcaaaacttgtggtagagccaccatatcggatggtccactagtaccctatacttgttgccccctcctatgccaactaactttgacaccattccatattacaagttcccttctatgactaaactccgtatccgtcccctgctcatgctgttgatgaggagtatattgctaagtataatttggccataagtcgaatgaaagatcttgataagacaga

SEQ ID NO: 1509 - DNA, 547 bp, Artificial
  Mutation introduced by TALE nuclease pair POT33_T01 within a POT33 allele
caagtgtgtgcaatagtagttctactactacaactctcaaaactcctttcatttcatccaatacttctttaggttccactcctaagccctctatagttaccggataaggcgcagcggtcgggcttcctccatggaaaacgtaacaaaactttcaaagtctcttgcaaagtttctaatagtggtgaccaaaaccaaaacattgaaacgaattctgttgatcgaagaaatgttcttcttggcttaggaggtctttatggtgttgctaatgctataccattagcagcatcggctactcctataccatcccctgatctcaaaacttgtggtagagccaccatatcggatggtccactagtaccctatacttgttgccccctcctatgccaactaactttgacaccattccatattacaagttcccttctatgactaaactccgtatccgtcccctgctcatgctgttgatgaggagtatattgctaagtataattttggccataagtcgaatgaaagatcttgataagacagaccctttaaaccctcttgg

SEQ ID NO: 1510 - DNA, 548 bp, Artificial
  Mutation introduced by TALE nuclease pair POT33_T01 within a POT33 allele
caagtgtgtgcaatagtagttctactactacaactctcaaaactcctttcatttcatccaatacttctttaggttccactcctaagccctctatagttaccggataaggcgcagcggtcggggcttcctccatggaaaacgtaacaaaactttcaaagtctcttgcaaagtttctaatagtggtgaccaaaaccaaaacattgaaacgaattctgttgatcgaagaaatgttcttcttggcttaggaggtctttatggtgttgctaatgctataccattagcagcatcggctactcctataccatcccctgatctcaaaacttgtggtagagccaccatatcggatggtccactagtaccctatacttgttgccccctcctatgccaactaactttgacaccattccatattacaagttcccttctatgactaaactcgtatccgtcccctgctcatgctgttgatgaggactatattgctaagtataatttggcccataaggtcgaatgaaagatcttgataagacagaccctttaaaccctcttgg

SEQ ID NO: 1511 - DNA, 574 bp, Artificial
  Mutation introduced by TALE nuclease pair POT33_T01 within a POT33 allele
caagtgtgtgcaatagtagttctactactacaactctcaaaactcctttcatttcatccaatacttctttaggttccactcctaagccctctcgctacaatttgctaaagctttatgctatttgggagcaagcatcaacttaattccccttttcctccatggaaaacgtaacaaaactttcaaagtctcttgcaaagtttctaatagtggtgaccaaaaccaaaacattgaaacgaattctgttgatcgaagaaatgttcttcttggcttaggaggtctttatggtgttgctaatgctataccattagcagcatcggctactcctataccatcccctgatctcaaaacttgtggtagagccaccatatcggatggtccactagtaccctatacttgttgccccctcctatgccaactaactttgacaccattccatattacaagttcccttctatgactaaactccgtatccgtcccctgctcatgctgttgatgaggagtatattgctaagtataatttggccataagtcgaatgaaagatcttgataagacagaccctttaaaccctcttgg

SEQ ID NO: 1512 - DNA, 548 bp, Artificial
  Mutation introduced by TALE nuclease pair POT33_T01 within a POT33 allele
caagtgtgtgcaatagtagttctactactacaactctcaaaactcctttcatttcatccaatacttctttaggttccactcctaagccctctatagttaccggataaggcgcagcggtcgggcttcctccatggaaaacgtaacaaaactttcaaagtctcttgcaaagtttctaatagtggtgaccaaaaccaaaacattgaaacgaattctgttgatcgaagaaatgttcttcttggcttaggaggtctttatggtgttgctaatgctataccattagcagcatcggctactcctataccatcccctgatctcaaaacttgtggtagagccaccatatcggatggtccactagtaccctatacttgttgccccctcctatgccaactaactttgacaccattccatattacaagttcccttctatgactaaactccgtatccgtcccctgctcatgctgttgatgaggagtatattgctaaagtataattttggccataagtcgaatgaaagatcttgataagacagaccctttaaaccctcttgg

SEQ ID NO: 1513 - DNA, 551 bp, Artificial
  Mutation introduced by TALE nuclease pair POT33_T01 within a POT33 allele
caagtgtgtgcaatagtagttctactactacaactctcaaaactcctttcatttcatccaatacttctttaggttccactcctaagccctctcagcaaaaacaggaaggcaaaatgccgcaaaaaaggggaaactttcctccatggaaaacgtaacaaaactttcaaagtctcttgcaaagtttctaatagtggtgaccaaaaccaaaacattgaaacgaattctgttgatcgaagaaatgttcttcttggcttaggaggtctttatggtgttgctaatgctataccattagcagcatcggctactcctataccatcccctgatctcaaaacttgtggtagagcccaccatatcggatggtccactagtaccctatacttgttgccccctcctatgccaactaactttgacaccattccatattacaagttcccttctatgactaaactccgtatccgtcccctgctcatgctgttgatgaggagtatattgctaagtataatttggccataagtcgaatgaaaggatcttgataagacagaccctttaaa

SEQ ID NO: 1514 - DNA, 537 bp, Artificial
  Mutation introduced by TALE nuclease pair POT33_T01 within a POT33 allele
caagtgtgtgcaatagtagttctactactacaactctcaaaactcctttcatttcatccaatacttctttaggttccactcctaagccctctcgctacaatttgctaaagctttatgctatttgggagcaagcatcaacttaattccccttttcctccatggaaaacgtaacaaaactttcaaagtctcttgcaaagtttctaatagtggtgaccaaaaccaaaacattgaaacgaattctgttgatcgaagaaatgttcttcttggcttaggaggtctttatggtgttgctaatgctataccattagcagcatcggctactcctataccatcccctgatctcaaaacttgtggtagagccaccatatcggatggtccactagtaccctatacttgttgccccctcctatgccaactaactttgacaccatttccatattacaagttcccttctatgactaaactccgtatccgtcccctgctcatgctgttgatgaggagtatattgctaagtataatttggccataagtcgaatg

SEQ ID NO: 1515 - DNA, 426 bp, Artificial
  Mutation introduced by TALE nuclease pair POT33_T02 within a POT33 allele
caagtgtgtgcaatagtagttctactactacaactctcaaaactcctttcatttcatccaatacttctttaggttccactcctaagccctctcaacttttcctccatggaaaacgtaacaaaactttcaaagtctcttgcaaagtttctaattgctaatgctataccattagcagcatcggctactcctataccatcccctgatctcaaaacttgtggtagagccaccatatcggatggtccactagtaccctatacttgttgcccccctcctatgccaactaactttgacaccattccatattacaagttcccttctatgactaaactccgtatccgtccccctgctcatgctgttgatgaaggagtatattgcctaaagtataattttggccataagtcgaatgaaagatcttgataagacaga

SEQ ID NO: 1516 - DNA, 434 bp, Artificial
  Mutation introduced by TALE nuclease pair POT33_T02 within a POT33 allele
caagtgtgtgcaatagtagttctactactacaactctcaaaactcctttcatttcatccaatacttctttaggttccactcctaagccctctcaacttttcctccatggaaaacgtaacaaaactttcaaagtctcttgcaaagtttctaattgctaatgctataccattagcagcatcggctactcctataccatccctgatctcaaaacttgtggtagagccaccatatcggatggtccactagtaccctatacttgttgcccccctcctatgccaactaactttgacaccattccatattacaagttcccttctatgactaaactccgtatccgtccccctgctcatgctgttgatgaggagtatattgctaagtataatttggccataagtcgaatgaaagatcttgataagacagaccctttaaaccct

SEQ ID NO: 1517 - DNA, 517 bp, Artificial
  Mutation introduced by TALE nuclease pair POT33_T02 within a POT33 allele
caagtgtgtgcaatagtagtctactactacaactctcaaaactcctttcatttcatccaatacttctttatggttaccactcctaagccctctcaacttttcctccatggaaaacgtaacaaaactttcaaagtctcttgcaaagtttctaatagtggtgaccaaaaccaaaacacgaattctgttgatcgaagaaatgttcttcttggcttaggaggtctttatggtgttgctaatgctataccattagcagcatcggctactcctataccatcccctgatctcaaaacttgtggtagaagccaccatatcggatggtccactagtaccctatacttgttgccccccctcctatgccaactaactttgacaccattccatattacaagttcccttctatgactaaactccgtatccgtcccctgctcatgctgttgatgaggagtatattgctaagtataatttggccataagtcgaatgaaagatcttgataagacagaccctttaaaccctctt

SEQ ID NO: 1518 - DNA, 520 bp, Artificial
  Mutation introduced by TALE nuclease pair POT33_T02 within a POT33 allele
caagtgtgtgcaatagtagttctactactacaactctcaaaactcctttcatttcatccaatacttctttaggttccactcctaagcccctctcaacttttcctccatggaaaacgtaacaaaactttcaaagtctcttgcaaagtttctaatagtggtgaccaaaaccaaaacattctgaattgattcgaagaaatgttcttcttggcttaggaggtctttatggtgttgctaatgctataccattagcagcatcggctactcctataccatcccctgatctcaaaacttgtggtagagccaccatatcggatggtccactagtaccctatacttgttgcccccctcctatgccaactaactttgtacaccacttccatattcacaagttcccttcctatgactaaactccagtatccgtcccctgctccatgctgttgatgaggagtatattgctaagtataatttggccataagtcgaatgaaagatcttgataagacagaccctttaaaccctctt

SEQ ID NO: 1519 - DNA, 506 bp, Artificial
  Mutation introduced by TALE nuclease pair POT33_T02 within a POT33 allele
caagtgtgtgcaatagtagttctactactacaactctcaaaactcctttcatttcatccaatacttctttaggttccactcctaagcccctctcaacttttcctccatggaaaacgtaacaaaactttcaaagtctcttgcaaagtttctaatagtggtgaccaaaaccaaaacaaacgaattctgttgatcgaagaaatgttcttcttggcttaggaggtctttatggtgttgctaatgctataccattagcagcatcggctactcctataccatcccctgatctcaaacttgtggtagagccaccatatcggatggtccactagtaacctatacttgttgcccccctcctcatgccaactaactttagtacaccacttccatattcacaagtttcccattccttatgactaaactcagtactccgtcccctgctccatgctgttgatgatggagtatagttgctaagtatcaattttggccataaagtcagaattggcaaagaa

SEQ ID NO: 1520 - DNA, 520 bp, Artificial
  Mutation introduced by TALE nuclease pair POT33_T02 within a POT33 allele
caagtgtgtgcaatagtagttctactactacaactctcaaaactcctttcatttcatccaatacttctttaggttccactcctaagcccctctcaacttttcctccatggaaaacgtaacaaaactttcaaagtctcttgcaaagtttctaatagtggtgaccaaaaccaaaacattctgaattgattcgaagaaatgttcttcttggcttaggaggtctttatggtgttgctaatgctataccattagcagcatcggctactcctataccatcccctgatctcaaaacttgtggtagagccaccatatcggatggtccactagtaccctatacttgttgcccccctcctatgccaactaactttgtacaccattccattattcacaagttcccttcctatgactaaactccagtatccgtcccctgctccatgctgttgatgaggagtatattgctaagtataatttggccataagtcgaatgaaagatcttgataagacagaccctttaaaccctctt

SEQ ID NO: 1521 - DNA, 447 bp, Artificial
  Mutation introduced by TALE nuclease pair POT33_T02 within a POT33 allele
caagtgtgtgcaatagtagttctactactacaactctcaaaactcctttcatttcatccaatacttctttaggttccactcctaagcccctctcaacttttcctccatggaaaacgtaacaaaactttcaaagtctcttgcaaagtttctaatagtggtgaccaaaaccaaaaacgaattctgttgatcgaagaaatgttcttcttggcttaggaggtctttatggtgttgctaatgctataccattagcagcatcggctactcctataccatcccctgatctcaaaacttgtggtagagccaccatatcggatggtccactagtaccctatacttgttgcccccctcctatgccaactaactttgtacaccacttccattattcacaagttcccattcctatgactaaactccagtactccgtcccctgctccatgctgttgatga

SEQ ID NO: 1522 - DNA, 514 bp, Artificial
  Mutation introduced by TALE nuclease pair POT33_T02 within a POT33 allele
caagtgtgtgcaatagtagttctactactacaactctcaaaactcctttcatttcatccaatacttctttaggttccactcctaagcccctctcaacttttcctccatggaaaacgtaacaaaactttcaaagtctcttgcaaagtttctaatagtggtgaccaaaaccaaaaacgaattctgttgatcgaagaaatgttcttcttggcttaggaggtctttatggtgttgctaatgctataccattagcagcatcggctactcctataccatcccctgatctcaaaacttgtggtagagccaccatatcggatggtccactagtaccctatacttgttgcccccctcctatgccaactaactttgacaccattccatattacaagttcccttctatgactaaactccgtatccgtcccctgctcatgctgttgatgaggagtatattgctaagtataatttggccataagtcgaatgaaagatcttgataagacagaccctttaaaccctctt

SEQ ID NO: 1523 - DNA, 476 bp, Artificial
  Mutation introduced by TALE nuclease pair POT33_T02 within a POT33 allele
caagtgtgtgcaatagtagttctactactacaactctcaaaactcctttcatttcatccaatacttctttaggttccactcctaagcccctctcaacttttcctccatggaaaacgtaacaaaactttcaaagtctcttgcaaagtttctaatagtggtgaccaaaaccaaaacaaacgaattctgttgatcgaagaaatgttcttcttggcttaggaggtctttatggtgttgctaatgctataccattagcagcatcggctactcctataccatcccctgatctcaaaacttgtggtagagccaccatatcggatggtccactagtaccctatacttgttgcccccctcctcatgccaactaactttgtacaccacttccattattcacaagttcccttcctatgactaaactcagtactccgtcccctgctccatgctgttgatgatggagtatagttgctaagtataatttt

SEQ ID NO: 1524 - DNA, 466 bp, Artificial
  Mutation introduced by TALE nuclease pair POT33_T02 within a POT33 allele
caagtgtgtgcaatagtagttctactactacaactctcaaaactcctttcatttcatccaatacttctttaggttccactcctaagcccctctcaacttttcctccatggaaaacgtaacaaaactttcaaagtctcttgcaaagtttctaatagtggtgaccaaaacgaattctgttgatcgaagaaatgttcttcttggcttaggaggtctttatggtgttgctaatgctataccattagcagcatcggctactcctataccatcccctgatctcaaaacttgtggtagagccaccatatcggatggtccactagtaccctatacttgttgcccccctcctcatgccaactaactttgtacaccacttccattattcacaagtttcccattccttatgactaaactccagtactccgtcccctgctccatgctgttgatgatggagtatagttgctaagtataa

SEQ ID NO: 1525 - DNA, 471 bp, Artificial
  Mutation introduced by TALE nuclease pair POT33_T02 within a POT33 allele
caagtgtgtgcaatagtagttctactactacaactctcaaaactcctttcatttcatccaatacttctttaggttccactcctaagcccctctcaacttttcctccatggaaaacgtaacaaaactttcaaagtctcttgcaaagtttctaatagtggtgaccaaaaccaaaacaacgaattctgttgatcgaagaaatgttcttcttggcttaggaggtctttatggtgttgctaatgctataccattagcagcatcggctactcctataccatcccctgatctcaaaacttgtggtagagccaccatatcggatggtccactagtaccctatacttgttgcccccctcctcatgccaactaactttgtacaccacttccattattcacaagtttcccattcctatgactaaactcagtactccgtcccctgctccatgctgttgatgatggagtatagttgctaagtat

SEQ ID NO: 1526 - DNA, 516 bp, Artificial
  Mutation introduced by TALE nuclease pair POT33_T02 within a POT33 allele
caagtgtgtgcaatagtagttctactactacaactctcaaaactcctttcatttcatccaatacttctttaggttccactcctaagcccctctcaacttttcctccatggaaaacgtaacaaaactttcaaagtctcttgcaaagtttctaatagtggtgaccaaaaccaaaacattctgttgatcgaagaaatgttcttcttggcttaggaggtctttatggtgttgctaatgctataccattagcagcatcggctactcctataccatcccctgatctcaaaacttgtggtagagccaccatatcggatggtccactagtaccctatacttgttgcccccctcctatgccaactaactttgtacaccattccatattcacaagttcccttcctatgactaaactccagtatccgtcccctgctccatgctgttgatgaggagtatattgctaagtataatttggccataagtcgaatgaaagatcttgataagacagaccctttaaaccctctt

SEQ ID NO: 1527 - DNA, 507 bp, Artificial
  Mutation introduced by TALE nuclease pair POT33_T02 within a POT33 allele
caagtgtgtgcaatagtagttctactactacaactctcaaaactcctttcatttcatccaatacttctttaggttccactcctaagcccctctcaacttttcctccatggaaaacgtaacaaaactttcaaagtctcttgcaaagtttctaatagtggtgaccaaaaccaattctgttgatcgaagaaatgttcttcttggcttaggaggtctttatggtgttgctaatgctataccattagcagcatcggctactcctataccatcccctgatctcaaaacttgtggtagagccaccatatcggatggtccactagtaccctatacttgttgcccccctcctatgccaactaactttgacaccattccatattacaagttcccttctatgactaaactccgtatccgtcccctgctcatgctgttgatgaggagtatattgctaagtataatttggccataagtcgaatgaaagatcttgataagacagaccctttaaaccctctt

SEQ ID NO: 1528 - DNA, 485 bp, Artificial
  Mutation introduced by TALE nuclease pair POT33_T02 within a POT33 allele
caagtgtgtgcaatagtagttctactactacaactctcaaaactcctttcatttcatccaatacttctttaggttccactcctaagcccctctcaacttttcctccatggaaaacgtaacaaaactttcaaagtctcttgcaaagtttctaatagtggtgaccaaaaccaaaacaaacgaattctgttgatcgaagaaatgttcttcttggcttaggaggtctttatggtgttgctaatgctataccattagcagcatcggctactcctataccatcccctgatctcaaaacttgtggtagagccaccatatcggatggtccactagtaccctatacttgttgcccccctcctcatgccaactaactttgtacaccacttccattattcacaagtttcccattcctatgactaaactccagtactccgtcccctgctccatgctgttgatgatggagtatagttgctaagtataattttggccat

SEQ ID NO: 1529 - DNA, 417 bp, Artificial
  Mutation introduced by TALE nuclease pair POT33_T02 within a POT33 allele
caagtgtgtgcaatagtagttctactactacaactctcaaaactcctttcatttcatccaatacttctttaggttccactcctaagcccctctcaacttttcctccatggaaggcttaggaggtctttatggtgttgctaatgctataccattagcagcatcggctactcctataccatcccctgatctcaaaacttgtggtagagccaccatatcggatggtccactagtactctatacttgttgcccccctcctatgccaactaactttgacaccattccatattacaagttcccttctatgactaaactccgtatccgtccccctgctcatgctgttgatgaggagtatattgctaagtataatttggccataagtcgaatgaaagatcttgataagacagaccctttaaaccc

SEQ ID NO: 1530 - DNA, 516 bp, Artificial
  Mutation introduced by TALE nuclease pair POT33_T02 within a POT33 allele
caagtgtgtgcaatagtagttctactactacaactctcaaaactcctttcatttcatccaatacttctttaggttccactcctaagcccctctcaacttttcctccatggaaaacgtaacaaaactttcaaagtctcttgcaaagtttctaatagtggtgaccaaaaccaacaatgaaaattctgttgatcgaagaaatgttcttcttggcttaggaggtctttatggtgttgctaatgctataccattagcagcatcggctactcctataccatcccctgatctcaaaacttgtggtagagccaccatatcggatggtccactagtaccctatacttgttgcccccctcctatgccaactaactttgacaccattccatattacaagttcccttctatgactaaactccgtatccgtcccctgctcatgctgttgatgaggagtatattgctaagtataatttggccataagtcgaatgaaagatcttgataagacagaccctttaaaccctctt

SEQ ID NO: 1531 - DNA, 450 bp, Artificial
  Mutation introduced by TALE nuclease pair POT33_T02 within a POT33 allele
caagtgtgtgcaatagtagttctactactacaactctcaaaactcctttcatttcatccaatacttctttaggttccactcctaagcccctctcaacttttcctccatggaaaacgtaacaaaactttcaaagtctcttgcaaagtttctaatagtggtgaccaaaaccaaaacgaattctgttgatcgaagaaatgttcttcttggcttaggaggtctttatggtgttgctaatgctataccattagcagcatcggctactcctataccatcccctgatctcaaaacttgtggtagagccaccatatcggatggtccactagtaccctatacttgttgcccccctcctcatgccaactaactttagtacaccacttccattattcacaagttcccattccttatgactaaactccagtactccgtcccctgctcccatgctgttgatga

SEQ ID NO: 1532 - DNA, 460 bp, Artificial
  Mutation introduced by TALE nuclease pair POT33_T02 within a POT33 allele
caagtgtgtgcaatagtagttctactactacaactctcaaaactcctttcatttcatccaatacttctttaggttccactcctaagccctctcaacttttcctccatggaaaacgtaacaaaactttcaaagtctcttgcaaagtttctaatagtggttacgaattctgttgatcgaagaaatgttcttcttggcttaggaggtctttatggtgttgctaatgctataccattagcagcatcggctactcctataccatcccctgatctcaaaacttgtggtagagccaccatatcggatggtccactagtaccctatacttgttgcccccctcctcatgccaactaactttgtacaccacttccatattcacaagttcccattcctatgactaaactccagtactccgtcccctgctccatgctgttgatgatggagtatagttgctaagtataatttt

SEQ ID NO: 1533 - DNA, 480 bp, Artificial
  Mutation introduced by TALE nuclease pair POT33_T02 within a POT33 allele
taagtgtgtgcaatagtagttctactactacaactctcaaaactcctttcatttcatccaatacttctttaggttccactcctaagcccctctcaacttttcctccatggaaaacgtaacaaaactttcaaagtctcttgcaaagtttctaatagtggtgaccaaaaccaaaacaattctgttgatcgaagaaatgttcttcttggcttaggaggtctttatggtgttgctaatgctataccattagcagcatcggctactcctataccatcccctgatctcaaaacttgtggtagagccaccatatcggatggtccactagtaccctatacttgttgcccccctcctcatgccaactaactttgtacaccacttccattattcacaagtttcccttccttatgactaaactccagtactccgtcccctgctccatgctgttgatgatggagtatagttgctaagtataattttggccat

SEQ ID NO: 1534 - DNA, 512 bp, Artificial
  Mutation introduced by TALE nuclease pair POT33_T02 within a POT33 allele
caagtgtgtgcaatagtagttctactactacaactctcaaaactcctttcatttcatccaatacttctttaggttccactcctaagcccctctcaacttttcctccatggaaaacgtaacaaaactttcaaagtctcttgcaaagtttctaatagtggtgaccaaaaccaaacgaattctgttgatcgaagaaatgttcttcttggcttaggaggtctttatggtgttgctaatgctataccattagcagcatcggctactcctataccatcccctgatctcaaaacttgtggtagagccaccatatcggatggtccactagtaccctatacttgttgcccccctcctatgccaactaactttgacaccattccatattacaagttcccttctatgactaaactccgtatccgtcccctgctcatgctgttgatgaggagtatattgctaagtataatttggccataagtcgaatgaaagatcttgataagacagaccctttaaaccctctt

SEQ ID NO: 1535 - DNA, 518 bp, Artificial
  Mutation introduced by TALE nuclease pair POT33_T02 within a POT33 allele
caagtgtgtgcaatagtagttctactactacaactctcaaaactcctttcatttcatccaatacttctttaggttccactcctaagcccctctcaacttttcctccatggaaaacgtaacaaaactttcaaagtctcttgcaaagtttctaatagtggtgaccaaaaccaaaacgaattctgttgatcgaagaaatgttcttcttggcttaggaggtctttatggtgttgctaatgctataccattagcagcatcggctactcctataccatcccctgatctcaaaacttgtggtagagccaccatatcggatggtccactagtaccctatacttgttgcccccctcctatgccaactaactttgtacaccacttccattattcacaagttcccttcctatgactaaactccagtatccgtcccctgctccatgctgttgatgaggagtatattgctaagtataatttggccataagtcgaatgaaagatcttgataagacagaccctttaaaccctc

SEQ ID NO: 1536 - DNA, 507 bp, Artificial
  Mutation introduced by TALE nuclease pair POT33_T02 within a POT33 allele
caagtgtgtgcaatagtagttctactactacaactctcaaaactcctttcatttcatccaatacttctttaggttccactcctaagcccctctcaacttttcctccatggaaaacgtaacaaaactttcaaagtctcttgcaaagtttctaatagtggtgaccaaaaccaaattctgttgatcgaagaaatgttcttcttggcttaggaggtctttatggttttgctaatgctataccattagcagcatcggctactcctataccatcccctgatctcaaaacttgtggtagagccaccatatcggatggtccactagtaccctatacttgttgcccccctcctatgccaactaactttgacaccattccatattacaagttcccttctatgactaaactccgtatccgtcccctgctccatgctgttgatgaggagtatattgctaagtataatttggccataagtcgaatgaaagatcttgataagacagaccctttaaaccctc

SEQ ID NO: 1537 - DNA, 470 bp, Artificial
  Mutation introduced by TALE nuclease pair POT33_T02 within a POT33 allele
caagtgtgtgcaatagtagttctactactacaactctcaaaactcctttcatttcatccaatacttctttaggttccactcctaagcccctctcaacttttcctccatggaaaacgtaacaaaactttcaaagtctcttgcaaagtttctaatagtggtgaccaaaaccaaacgaattctgttgatcgaagaaatgttcttcttggcttaggaggtctttatggtgttgctaatgctataccattagcagcatcggctactcctataccatcccctgatctcaaaacttgtggtagagccaccatatcggatggtccactagtaccctatacttgttgcccccctcctatgccaactaactttgtacaccattccatattcacaagtttcccttccttatgactaaactccagtatccgtcccctgctccatgctgttgatgatggagtatagttgctaagtataatttt

SEQ ID NO: 1538 - DNA, 517 bp, Artificial
  Mutation introduced by TALE nuclease pair POT33_T02 within a POT33 allele
caagtgtgtgcaatagtagttctactactacaactctcaaaactcctttcatttcatccaatacttctttaggttccactcctaagcccctctcaacttttcctccatggaaaacgtaacaaaactttcaaagtctcttcaaagtttctaatagtggtgaccaaaaccaaaacgaattctgttgatcgaagaaatgttcttcttggcttaggaggtctttatggtgttgctaatgctataccattagcagcatcggctactcctataccatcccctgatctcaaaacttgtggtagagccaccatatcggatggtccactagtaccctatacttgttgcccccctcctatgccaactaactttgtacaccattccatattcacaagttcccttcctatgactaaactccagtatccgtcccctgctccatgctgttgatgaggagtatattgctaagtataatttggccataagtcgaatgaaagatcttgataagacagaccctttaaaccctctt

SEQ ID NO: 1539 - DNA, 504 bp, Artificial
  Mutation introduced by TALE nuclease pair POT33_T02 within a POT33 allele
caagtgtgtgcaatagtagttctactactacaactctcaaaactcctttcatttcatccaatacttctttaggttccactcctaagccctctcaacttttcctccatggaaaacgtaacaaaactttcaaagtctcttgcaaagtttctaatagtggtgaccaaatttctgttgatcgaagaaatgttcttcttggcttaggaggtctttatggtgttgctaatgctataccattagcagcatcggctactcctataccatcccctgatctcaaaacttgtggtagagccaccatatcggatggtccactagtaccctatacttgttgcccccctcctatgccaactaactttgacaccattccatattacaagttcccttctatgactaaactccgtatccgtcccctgctccatgctgttgatgaggagtatattgctaagtataattttggccataagtcgaatgaaagatcttgataagacagaccctttaaaccctctt

SEQ ID NO: 1540 - DNA, 512 bp, Artificial
  Mutation introduced by TALE nuclease pair POT33_T02 within a POT33 allele
caagtgtgtgcaatagtagttctactactacaactctcaaaactcctttcatttcatccaatacttctttaggttccactcctaagcccctctcaacttttcctccatggaaaacgtaacaaaactttcaaagtctcttgcaaagtttctaatagtggtgaccaaaaccaattgaattctgttgatcgaagaaatgttcttcttggcttaggaggtctttatggtgttgctaatgctataccattagcagcatcggctactcctataccatcccctgatctcaaaacttgtggtagagccaccatatcggatggtccactagtaccctatacttgttgcccccctcctatgccaactaactttgacaccattccatattacaagttcccttctatgactaaactccgtatccgtcccctgctccatgctgttgatgaggagtatattgctaagtataatttggccataagtcgaatgaaagatcttgataagacagaccctttaaaccctct

SEQ ID NO: 1541 - DNA, 513 bp, Artificial
  Mutation introduced by TALE nuclease pair POT33_T02 within a POT33 allele
caagtgtgtgcaatagtagttctactactacaactctcaaaactcctttcatttcatccaatacttctttaggttccactcctaagccctctcaacttttcctccatggaaaacgtaacaaaactttcaaagtctcttgcaaagtttctaatagtggtgaccaaaaccaaaacgaattctgttgatcgaagaaatgttcttcttggcttaggaggtctttatggtgttgctaatgctataccattagcagcatcggctactcctataccatcccctgatctcaaaacttgtggtagagccaccatatcggatggtccactagtaccctatacttgttgcccccctcctatgccaactaactttgacaccattccatattacaagttcccttctatgactaaactccgtatccgtcccctgctccatgctgttgatgaggagtatattgctaagtataatttggccataagtcgaatgaaagatcttgataagacagaccctttaaaccctctt

SEQ ID NO: 1542 - DNA, 515 bp, Artificial
  Mutation introduced by TALE nuclease pair POT33_T02 within a POT33 allele
caagtgtgtgcaatagtagttctactactacaactctcaaaactcctttcatttcatccaatacttctttaggttccactcctaagcccctctcaacttttcctccatggaaaacgtaacaaaactttcaaagtctcttgcaaagtttctaatagtggtgaccaaaaccaaatgaaacattctgttgatcgaagaaatgttcttcttggcttaggaggtctttatggtgttgctaatgctataccattagcagcatcggctactcctataccatcccctgatctcaaaacttgtggtagagccaccatatcggatggtccactagtaccctatacttgttgcccccctcctatgccaactaactttgacaccattccatattacaagttcccttctatgactaaactccgtatccgtcccctgctcatgctgttgatgaggagtatattgctaagtataatttggccataagtcgaatgaaagatcttgataagacagaccctttaaaccctctt

SEQ ID NO: 1543 - DNA, 513 bp, Artificial
  Mutation introduced by TALE nuclease pair POT33_T02 within a POT33 allele
caagtgtgtgcaatagtagttctactactacaactctcaaaactcctttcatttcatccaatacttctttaggttccactcctaagcccctctcaacttttcctccatggaaaacgtaacaaaactttcaaagtctcttgcaaagtttctaatagtggtgaccaaaaccaaaacgaattctgttgatcgaagaaatgttcttcttggcttaggaggtctttatggtgttgctaatgctataccattagcagcatcggctactcctataccatcccctgatctcaaaacttgtggtagagccaccatatcggatggtccactagtaccctatacttgttgcccccctcctatgccaactaactttgacaccattccatattacaagttcccttctatgactaaactccgtatccgtcccctgctcatgctgttgatgaggagtatattgctaagtataatttggccataagtcgaatgaaagatcttgataagacagaccctttaaaccctctt

SEQ ID NO: 1544 - DNA, 469 bp, Artificial
  Mutation introduced by TALE nuclease pair POT33_T02 within a POT33 allele
caagtgtgtgcaatagtagttctactactacaactctcaaaactcctttcatttcatccaatacttctttaggttccactcctaagcccctctcaacttttcctccatggaaaacgtaacaaaactttcaaagtctcttgcaaagtttctaatagtggtgaccaaaacaaatgaaacattctgttgatcgaagaaatgttcttcttggcttaggaggtctttatggtgttgctaatgctataccattagcagcatcggctactcctataccatcccctgatctcaaaacttgtggtagagccaccatatcggatggtccactagtaccctatacttgttgcccccctcctatgccaactaactttgtacaccacttccattattcacaagtttcccttcctatgactaaactccagtactccgtcccctgctccatgctgttgatgaggagtatagttgctaagtataa

SEQ ID NO: 1545 - DNA, 484 bp, Artificial
  Mutation introduced by TALE nuclease pair POT33_T02 within a POT33 allele
caagtgtgtgcaatagtagttctactactacaactctcaaaactcctttcatttcatccaatacttctttaggttccactcctaagccctctcaacttttcctccatggaaaacgtaacaaaactttcaaagtctcttgcaaagtttctaatagtggtgaccaaaaccaaaaacgaattctgttgatcgaagaaatgttcttcttggcttaggaggtctttatggtgttgctaatgctataccattagcagcatcggctactcctataccatcccctgatctcaaaacttgtggtagagccaccatatcggatggtccactagtaccctatacttgttgcccccctcctcatgccaacctaactttagtacaccacttccattattcacaagtttcccattccttatgactaaactccagtactccgtcccctgctccatgctgttgatgatggagtatagttgctaagtataattttggccat

SEQ ID NO: 1546 - DNA, 516 bp, Artificial
  Mutation introduced by TALE nuclease pair POT33_T02 within a POT33 allele
caagtgtgtgcaatagtagttctactactacaactctcaaaactcctttcatttcatccaatacttctttaggttccactcctaagcccctctcaacttttcctccatggaaaacgtaacaaaactttcaaagtctcttgcaaagtttctaatagtggtgaccaaaaccaaatgaaacattctgttgatcgaagaaatgttcttcttggcttaggaggtctttatggtgttgctaatgctataccattagcagcatcggctactcctataccatcccctgatctcaaaacttgtggtagagccaccatatcggatggtccactagtaccctatacttgttgcccccctcctatgccaactaactttgacaccattccatattacaagttcccttctatgactaaactccgtatccgtcccctgctccatgctgttgatgaggagtatattgctaagtataatttggccataagtcgaatgaaagatcttgataagacagaccctttaaaccctctt

SEQ ID NO: 1547 - DNA, 475 bp, Artificial
  Mutation introduced by TALE nuclease pair POT33_T02 within a POT33 allele
caagtgtgtgcaatagtagttctactactacaactctcaaaactcctttcatttcatccaatacttctttaggttccactcctaagcccctctcaacttttcctccatggaaaacgtaacaaaactttcaaagtctcttgcaaagtttctaatagtggtgaccaaaaccaaaaacgaattctgttgatcgaagaaatgttcttcttggcttaggaggtctttatggtgttgctaatgctataccattagcagcatcggctactcctataccatcccctgatctcaaaacttgtggtagagccaccatatcggatggtccactagtaccctatacttgttgcccccctcctcatgccaactaactttgtacaccacttccattattcacaagttcccattcctatgactaaactccagtactccgtcccctgctccatgctgttgatgatggagtatagttgctaagtataatttt

SEQ ID NO: 1548 - DNA, 477 bp, Artificial
  Mutation introduced by TALE nuclease pair POT33_T02 within a POT33 allele
caagtgttgcaatagtagttctactactacaactctcaaaactcctttcatttcatccaatacttctttaggttccactcctaagcccctctcaacttttcctccatggaaaacgtaacaaaactttcaaagtctcttgcaaagtttctaatagtggtgaccaaaaccaaaacgaattctgttgatcgaagaaatgttcttcttggcttaggaggtctttatggtgttgctaatgctataccattagcagcatcggctactcctataccatcccctgatctcaaaacttgtggtagagccaccatatcggatggtccactagtaccctatacttgttgcccccctcctcatgccaactaactttgtacaccacttccattattcatcaagtttcccattccttatgacttaaactccagtactccgtcccctgctccatgctgttgatgatggagtatagttgctaagtataatttt

SEQ ID NO: 1549 - DNA, 515 bp, Artificial
  Mutation introduced by TALE nuclease pair POT33_T02 within a POT33 allele
caagtgtgtgcaatagtagttctactactacaactctcaaaactcctttcatttcatccaatacttctttaggttccactcctaagcccctctcaacttttcctccatggaaaacgtaacaaaactttcaaagtctcttgcaaagtttctaatagtggtgaccaaaaccaaaaacgaattctgttgatcgaagaaatgttcttcttggcttaggaggtctttatggtgttgctaatgctataccattagcagcatcggctactcctataccatcccctgatctcaaaacttgtggtagagccaccatatcggatggtccactagtaccctatacttgttgcccccctcctatgccaactaactttgacaccattccatattacaagttcccttctatgactaaactccgtatccgtcccctgctccatgctgttgatgaggagtatattgctaagtataatttggccataagtcgaatgaaagatcttgataagacagaccctttaaaccctctt

SEQ ID NO: 1550 - DNA, 523 bp, Artificial
  Mutation introduced by TALE nuclease pair POT33_T02 within a POT33 allele
caagtgtgtgcaatagtagttctactactacaactctcaaaactcctttcatttcatccaatacttctttaggttccactcctaagcccctctcaacttttcctccatggaaaacgtaacaaaactttcaaagtctcttgcaaagtttctaatagtggtgaccaaaaccaaaacaaacgaattctgttgatcgaagaaatgttcttcttggcttaggaggtctttatggtgttgctaatgctataccattagcagcatcggctactcctataccatcccctgatctcaaaacttgtggtagagccaccatatcggatggtccactagtaccctatacttgttgcccccctcctatgccaactaactttgtacaccattccattattcacaagttcccttcctatgactaaactccagtatccgtcccctgctccatgctgttgatgaggagtatattgctaagtataatttggccataagtcgaatgaaagatcttgataagacagaccctttaaaccctctt

SEQ ID NO: 1551 - DNA, 516 bp, Artificial
  Mutation introduced by TALE nuclease pair POT33_T02 within a POT33 allele
caagtgtgtgcaatagtagttctactactacaactctcaaaactcctttcatttcatccaatacttctttaggttccactcctaagcccctctcaacttttcctccatggaaaacgtaacaaaactttcaaagtctcttgcaaagtttctaatagtggtgaccaaaaccaaaacaacgaattctgttgatcgaagaaatgttcttcttggcttaggaggtctttatggtgttgctaatgctataccattagcagcatcggctactcctataccatcccctgatctcaaaacttgtggtagagccaccatatcggatggtccactagtaccctatacttgttgcccccctcctatgccaactaactttgacaccattccatattacaagttcccttctatgactaaactccgtatccgtcccctgctcatgctgttgatgaggagtatattgctaagtataatttggccataagtcgaatgaaagatcttgataagacagaccctttaaaccctctt

SEQ ID NO: 1552 - DNA, 422 bp, Artificial
  Mutation introduced by TALE nuclease pair POT33_T02 within a POT33 allele
caagtgtgtgcaatagtagttctactactacaactctcaaaactcctttcatttcatccaatacttctttaggttccactcctaaattctgttgatcgaagaaatgttcttcttggcttaggaggtctttatggtgttgctaatgctataccattagcagcatcggctactcctataccatcccctgatctcaaaacttgtggtagagccaccatatcggatggtccactagtaccctatacttgttgccccctcctatgcaactaactttgacaccattccatattacaagttcccttctatgactaaactccgtatccgtccccctgctcatgctgttgatgaggagtatattgctaagtataattttggccataagtcgaatgaaagatcttgataagacagaccctttaaaccctctt

SEQ ID NO: 1553 - DNA, 514 bp, Artificial
  Mutation introduced by TALE nuclease pair POT33_T02 within a POT33 allele
caagtgtgtgcaatagtagttctactactacaactctcaaaactcctttcatttcatccaatacttctttaggttccactcctaagcccctctcaacttttcctccatggaaaacgtaacaaaactttcaaagtctcttgcaaagtttctaatagtggtgaccaaaaccaaaacgaattctgttgatcgaagaaatgttcttcttggcttaggaggtctttatggtgttgctaatgctataccattagcagcatcggctactcctataccatcccctgatctcaaaacttgtggtagagccaccatatcggatggtccactagtaccctatacttgttgcccccctcctatgccaactaactttgacaccattccatattacaagttcccttctatgactaaactccgtatccgtcccctgctccatgctgttgatgaggagtatattgctaagtataatttggccataagtcgaatgaaagatcttgataagacagaccctttaaaccctctt

SEQ ID NO: 1554 - DNA, 494 bp, Artificial
  Mutation introduced by TALE nuclease pair POT33_T02 within a POT33 allele
caagtgtgtgcaatagtagttctactactacaactctcaaaactcctttcatttcatccaatacttctttaggttccactcctaagccctctcaacttttcctccatggaaaacgtaacaaaactttcaaagtctcttgcaaagtttctaatagtggtgaccaaaaccaaattctgttgatcgaagaaatgttcttcttggcttaggaggtctttatggtgttgctaatgctataccattagcagcatcggctactcctataccatcccctgatctcaaaacttgtggtagagccaccatatcggatggtctactagtaccctatacttgttgcccccctcctatgccaactaactttgacaccattccatattacaagttcccttctatgactaaactccgtatccgtcccctgctcatgctgttgatgaggagtatattgctaagtataatttggccataagtcgaatgaaagatcttgataagacagaccc

SEQ ID NO: 1555 - DNA, 512 bp, Artificial
  Mutation introduced by TALE nuclease pair POT33_T02 within a POT33 allele
caagtgtgtgcaatagtagttctactactacaactctcaaaactcctttcatttcatccaatacttctttaggttccactcctaagcccctctcaacttttcctccatggaaaacgtaacaaaactttcaaagtctcttgcaaagtttctaatagtggtgaccaaaaccaaaacattctgttgatcgaagaaatgttcttcttggcttaggaggtctttatggtgttgctaatgctataccattagcagcatcggctactcctataccatcccctgatctcaaaacttgtggtagagccaccatatcggatggtccactagtaccctatacttgttgcccccctcctatgccaactaactttgacaccattccatattacaagttcccttctatgactaaactccgtatccgtcccctgctccatgctgttgatgaggagtatattgctaagtataatttggccataagtcgaatgaaagatcttgataagacagaccctttaaaccctctt

SEQ ID NO: 1556 - DNA, 424 bp, Artificial
  Mutation introduced by TALE nuclease pair POT33_T02 within a POT33 allele
caagtgtgtgcaatagtagttctactactacaactctcaaaactcctttcatttcatccaatacttctttaggttccactcctaaattctgttgatcgaagaaatgttcttcttggcttaggaggtctttatggtgttgctaatgctataccattagcagcatcggctactcctataccatcccctgatctcaaaacttgtggtagagccaccatatcggatggtccactagtaccctatacttgttgccccctcctatgccaactaactttgacaccattccatattacaagttcccttctatgactaaacttccgtatccgtccccctgctcatgctgttgatgaggagtatattgctaagtataattttggccataagtcgaatgaaagatcttgataagacagaccctttaaaccctctt

SEQ ID NO: 1557 - DNA, 459 bp, Artificial
  Mutation introduced by TALE nuclease pair POT33_T02 within a POT33 allele
caagtgtgtgcaatagtagttctactactacaactctcaaaactcctttcatttcatccaatacttctttaggttccactcctaagccctctcaacttttcctccatggaaaacgtaacaaaacatttcaaatgtcatcttgctaaagtttcataattagtggtgaccaaaaccaaaacaaaattctgattgattcgaagaaatgttcttcttggcttaggaggtctttatggtgttgctaatgctataccattagcagcatcggctactcctataccatcccctgatctcaaaacttgtggtagagccaccatatcggatggtccactagtaccctatacttgttgcccccctcctatgccaactaactttgtacaccacttccattattcacaagttcccttcctatgactaaactccagtatccgtcccctgctccatgctgttgatgaggagtat

SEQ ID NO: 1558 - DNA, 487 bp, Artificial
  Mutation introduced by TALE nuclease pair POT33_T02 within a POT33 allele
caagtgtgtgcaatagtagttctactactacaactctcaaaactcctttcatttcatccaatacttctttaggttccactcctaagcccctctcaacttttcctccatggaaaacgtaacaaaactttcaaagtctcttgcaaagtttctaatagtggtgaccaaaaccaaaaacgaattctgttgatcgaagaaatgttcttcttggcttaggaggtctttatggtgttgctaatgctataccattagcagcatcggctactcctataccatcccctgatctcaaaacttgtggtagagccaccatatcggatggtccactagtaccctatacttgttgcccccctcctatgccaactaactttgtacaccattccatattcacaagttcccttcctatgactaaactccagtatccgtcccctgctccatgctgttgatgaggagtatagttgctaagtataattttgggccataaagtcgaatt

SEQ ID NO: 1559 - DNA, 508 bp, Artificial
  Mutation introduced by TALE nuclease pair POT33_T02 within a POT33 allele
caagtgtgtgcaatagtagttctactactacaactctcaaaactcctttcatttcatccaatacttctttaggttccactcctaagcccctctcaacttttcctccatggaaaacgtaacaaaactttcaaagtctcttgcaaagtttctaatagtggtgaccaaaaccaaattctgttgatcgaagaaatgttcttcttggcttaggaggtctttatggtgttgctaatgctataccattagcagcatcggctactcctataccatcccctgatctcaaaacttgtggtagagccaccatatcggatggtctactagtaccctatacttgttgcccccctcctatgccaactaactttgacaccattccatattacaagttcccttctatgactaaactccgtatccgtcccctgctcatgctgttgatgaggagtatattgctaagtataatttggccataagtcgaatgaaagatcttgataagacagaccctttaaaccctctt

SEQ ID NO: 1560 - DNA, 469 bp, Artificial
  Mutation introduced by TALE nuclease pair POT33_T02 within a POT33 allele
caagtgtgtgcaatagtagttctactactacaactctcaaaactcctttcatttcatccaatacttctttaggttccactcctaagcccctctcaacttttcctccatggaaaacgtaacaaaactttcaaagtctcttgcaaagtttctaatagtggttacgaattctgttgatcgaagaaatgttcttcttggcttaggaggtctttatggtgttgctaatgctataccattagcagcatcggctactcctataccatcccctgatctcaaaacttgtggtagagccaccatatcggatggtccactagtaccctatacttgttgcccccctcctatgccaactaactttgtacaccacttccattattcacaagtttcccattccttatgactaaactccagtactccgtcccctgctccatgctgttgatgatggagtatagttgctaagtataattttggccat

SEQ ID NO: 1561 - DNA, 511 bp, Artificial
  Mutation introduced by TALE nuclease pair POT33_T02 within a POT33 allele
caagtgtgtgcaatagtagttctactactacaactctcaaaactcctttcatttcatccaatacttctttaggttccactcctaagcccctctcaacttttcctccatggaaaacgtaacaaaactttcaaagtctcttgcaaagtttctaatagtggtgacacatgaaacgaattctgttgatcgaagaaatgttcttcttggcttaggaggtctttatggtgttgctaatgctataccattagcagcatcggctactcctataccatcccctgatctcaaaacttgtggtagagccaccatatcggatggtccactagtaccctatacttgttgcccccctcctatgccaactaactttgacaccattccatattacaagttcccttctatgactaaactccgtatccgtcccctgctccatgctgttgatgaggagtatattgctaagtataatttggccataagtcgaatgaaagatcttgataagacagaccctttaaaccctctt

SEQ ID NO: 1562 - DNA, 444 bp, Artificial
  Mutation introduced by TALE nuclease pair POT33_T02 within a POT33 allele
caagtgtgtgcaatagtagttctactactacaactctcaaaactcctttcatttcatccaatacttctttaggttccactcctaagcccctctcaacttttcctccatggaaaacgtaacaaaactttcaaagtctcttgcaaagtttctaatagtggtgaccaaaaccaaaacgaattctgttgatcgaagaaatgttcttcttggcttaggaggtctttatggtgttgctaatgctataccattagcagcatcggctactcctataccatcccctgatctcaaaacttgtggtagagccaccatatcggatggtccactagtaccctatacttgttgcccccctcctatgccaactaactttgtacaccacttccatattcacaagttcccttcctatgactaaactccagtactccgtcccctgctccatgctgttgatga

SEQ ID NO: 1563 - DNA, 421 bp, Artificial
  Mutation introduced by TALE nuclease pair POT33_T02 within a POT33 allele
caagtgtgtgcaatagtagttctactactacaactctcaaaactcctttcatttcatccaatacttctttaggttccactcctaagcccctctcaacttttcatccatggaaaacgtaacaaaactttcaaagtctcttgcaaagtttctaatagtggtgaccaaacaacacgaaattctgttgatcgaagaaatgttcttcttggcttaggaggtctttatggtgttgctaatgctataccattagcagcatcggctactcctataccatcccctgatctcaaaacttgtggtagagccaccatatcggatggtccactagtaccctatacttgttgcccccctcctatgccaactaactttgacaccattccatatacaagttcccttcctatgactaaactccagtatccgtcccctg

SEQ ID NO: 1564 - DNA, 508 bp, Artificial
  Mutation introduced by TALE nuclease pair POT33_T02 within a POT33 allele
caagtgtgtgcaatagtagttctactactacaactctcaaaactcctttcatttcatccaatacttctttaggttccactcctaagcccctctcaacttttcctccatggaaaacgtaacaaaactttcaaagtctcttgcaaagtttctaatagtggtgaccaaaaccaaattctgttgatcgaagaaatgttcttcttggcttaggaggtctttatggtgttgctaatgctataccattagcagcatcggctactcctataccatcccctgatctcaaaacttgtggtagagccaccatatcggatggtccactagtaccctatacttgttgcccccctcctatgccaactaactttgacaccattccatattacaagttcccttctatgactaaactccgtatccgtcccctgctcatgctgttgatgaggagtatattgctaagtataatttggccataagtcgaatgaaagatcttgataagacagaccctttaaaccctctt

SEQ ID NO: 1565 - DNA, 513 bp, Artificial
  Mutation introduced by TALE nuclease pair POT33_T02 within a POT33 allele
caagtgtgtgcaatagtagttctactactacaactctcaaaactcctttcatttcatccaatacttctttaggttccactcctaagcccctctcaacttttcctccatggaaaacgtaacaaaactttcaaagtctcttgcaaagtttctaatagtggtgaccaaaaccaaaacaaattctgttgatcgaagaaatgttcttcttggcttaggaggtctttatggtgttgctaatgctataccattagcagcatcggctactcctataccatcccctgatctcaaaacttgtggtagagccaccatatcggatggtccactagtaccctatacttgttgcccccctcctatgccaactaactttgacaccattccatattacaagttcccttctatgactaaactccgtatccgtcccctgctcatgctgttgatgaggagtatattgctaagtataatttggccataagtcgaatgaaagatcttgataagacagaccctttaaaccctctt

SEQ ID NO: 1566 - DNA, 515 bp, Artificial
  Mutation introduced by TALE nuclease pair POT33_T02 within a POT33 allele
caagtgtgtgcaatagtagttctactactacaactctcaaaactcctttcatttcatccaatacttctttaggttccactcataagcccctctcaacttttcctccatggaaaacgtaacaaaactttcaaagtctcttgcaaagtttctaatagtggtgaccaaaaccaacaacgaattctgttgatcgaagaaatgttcttcttggcttaggaggtctttatggtgttgctaatgctataccattagcagcatcggctactcctataccatcccctgatctcaaaacttgtggtagagccaccatatcggatggtccactagtaccctatacttgttgcccccctcctatgccaactaactttgacaccattccatattacaagttcccttctatgactaaactccgtatccgtcccctgctccatgctgttgatgaggagtatattgctaagtataatttggccataagtcgaatgaaagatcttgataagacagaccctttaaaccctctt

SEQ ID NO: 1567 - DNA, 500 bp, Artificial
  Mutation introduced by TALE nuclease pair POT33_T02 within a POT33 allele
caagtgtgtgcaatagtagttctactactacaactctcaaaactcctttcatttcatccaatacttctttaggttccactcctaagcccctctcaacttttcctccatggaaaacgtaacaaaactttcaaagtctcttgcaaagtttctaatagtggtgaccaaaaccaaaacaaaacgaattctgttgatcgaagaaatgttcttcttggcttaggaggtctttatggtgttgctaatgctataccattagcagcatcggctactcctataccatcccctgatctcaaaacttgtggtagagccaccatatcggatggtccactagtaccctatacttgttgcccccctcctatgccaactaactttgtacaccattccatattcacaagtttcccttccttatgactaaactccagtatccgtcccctgctccatgctgttgatgaggagtatagttgctaagtataatttggccataagtcgaatgaaagatcttg

SEQ ID NO: 1568 - DNA, 502 bp, Artificial
  Mutation introduced by TALE nuclease pair POT33_T02 within a POT33 allele
caagtgtgtgcaatagtagttctactactacaactctcaaaactcctttcatttcatccaatacttctttaggttccactcctaagccctctcaacttttcctccatggaaaacgtaacaaaactttcaaagtctcttgcaatctaaacgaattctgttgatcgagaaatgttcttcttggcttaggaggtctttatggtgttgctaatgctataccattagcagcatcggctactcctataccatcccctgatctcaaaacttgtggtagagccaccatatcggatggtccactagtaccctatacttgttgcccccctcctatgccaactcaactttgactaccattccatacttactaagttcccttcatcattgcactaaactaccgtcatcgtcccctcgctcctgctgttgatgtaggagtagtattgcttaagatataattttggccataagtcgaatgaaagatcttgataagacagaccctttaaaccctctt

SEQ ID NO: 1569 - DNA, 517 bp, Artificial
  Mutation introduced by TALE nuclease pair POT33_T02 within a POT33 allele
caagtgtgtgcaatagtagttctactactacaactctcaaaactcctttcatttcatccaatacttctttaggttccactcctaagcccctctcaacttttcctccatggaaaacgtaacaaaactttcaaagtctcttgcaaagtttctaatagtggtgaccaaaaccaatgaaacgaattctgttgatcgaagaaatgttcttcttggcttaggaggtctttatggtgttgctaatgctataccattagcagcatcggctactcctataccatcccctgatctcaaaacttgtggtagagccaccatatcggatggtccactagtaccctatacttgttgcccccctcctatgccaactaactttgacaccattccatattacaagttcccttctatgactaaactccgtatccgtcccctgctccatgctgttgatgaggagtatattgctaagtataatttggccataagtcgaatgaaagatcttgataagacagaccctttaaaccctctt

SEQ ID NO: 1570 - DNA, 432 bp, Artificial
  Mutation introduced by TALE nuclease pair POT33_T02 within a POT33 allele
caagtgtgtgcaatagtagttctactactacaactctcaaaactcctttcatttcatccaatacttctttaggttccactcctaagcccctctcaacttttcctccatggaaaacgtaacaaaactttcaaagtctcttgcaaagtttctaatagtggtgaccaaaaccaaaacgaattctgttgatcgaagaaatgttcttcttggcttaggaggtctttatggtgttgctaatgctataccattagcagcatcggctactcctataccatcccctgatctcaaaacttgtggtagagccaccatatcggatggtccactagtaccctatacttgttgcccccctcctcatgccaactaactttgtacaccacttccattattcacaagttcccattcctatgactaaactccagtactccgtcccctgct

SEQ ID NO: 1571 - DNA, 511 bp, Artificial
  Mutation introduced by TALE nuclease pair POT33_T02 within a POT33 allele
caagtgtgtgcaatagtagttctactactacaactctcaaaactcctttcatttcatccaatacttctttaggttccactcctaagccctctcaacttttcctccatggaaaacgtaacaaaactttcaaaagtctcattgctaaagtttctaatagtggtgaatccaaaacgaattctgttgatcgaagaaatgttcttcttggcttaggaggtctttatggtgttgctaatgctataccattagcagcatcggctactcctataccatcccctgatctcaaaacttgtggtagagccaccatatcggatggtccactagtaccctatacttgttgcccccctcctatgccaactaactttgacaccattccatattacaagttcccttctatgactaaactccgtatccgtcccctgctcatgctgttgatgaggagtatattgctaagtataatttggccataagtcgaatgaaagatcttgataagacagaccctttaaaccctctt

SEQ ID NO: 1572 - DNA, 461 bp, Artificial
  Mutation introduced by TALE nuclease pair POT33_T02 within a POT33 allele
caagtgtgtgcaatagtagttctactactacaactctcaaaactcctttcatttcatccaatacttctttaggttccactcctaagcccctctcaacttttcctccatggaaaacgtaacaaaactttcaaagtctcttgcaaagtttctaatagtggtgaccaaaacaagaattctgttgatcgaagaaatgttcttcttggcttaggaggtctttatggtgttgctaatgctataccattagcagcatcggctactcctataccatcccctgatctcaaaacttgtggtagagccaccatatcggatggtccactagtaccctatacttgttgcccccctcctcatgccaactaactttagtacaccacttccattattcacaagtttcccattccttatgactaaactccagtactccgtcccctgctccatgctgttgatgatggagtatagttgct

SEQ ID NO: 1573 - DNA, 504 bp, Artificial
  Mutation introduced by TALE nuclease pair POT33_T02 within a POT33 allele
caagtgtgtgcaatagtagttctactactacaactctcaaaactcctttcatttcatccaatacttctttaggttccactcctaagccctctcaacttttcctccatggaaaacgtaacaaaactttcaaagtctcttgcaaagtttctaatagtggtgaccaaaaccaaaaacgaattctgttgatcgaagaaatgttcttcttggcttaggaggtctttatggtgttgctaatgctataccattagcagcatcggctactcctataccatcccctgatctcaaaacttgtggtagagccaccatatcggatggtccactagtaccctatacttgttgcccccctcctatgccaactaactttgtacaccacttccattattcacaagttcccttcctatgactaaactccagtatccgtcccctgctccatgctgttgatgaggagtatattgctaagtataatttggccataagtcgaatgaaagatcttgataagacaga

SEQ ID NO: 1574 - DNA, 441 bp, Artificial
  Mutation introduced by TALE nuclease pair POT33_T02 within a POT33 allele
caagtgtgtgcaatagtagttctactactacaactctcaaaactcctttcatttcatccaatacttctttaggttccactcctaagcccctctcaacttttcctccatggaaaacgtaacaaaactttcaaagtctcttgcaaagtttctaatagtggtgaccaaaaccaaattctgttgatcgaagaaatgttcttcttggcttaggaggtctttatggtgttgctaatgctataccattagcagcatcggctactcctataccatcccctgatctcaaaacttgtggtagagccaccatatcggatggtccactagtaccctatacttgttgcccccctcctcatgccaactaactttgtacaccacttccattattcacaagttcccttcctatgactaaactccagtactccgtcccctgctccatgctgttgatga

SEQ ID NO: 1575 - DNA, 446 bp, Artificial
  Mutation introduced by TALE nuclease pair POT33_T02 within a POT33 allele
caagtgtgtgcaatagtagttctactactacaactctcaaaactcctttcatttcatccaatacttctttaggttccactcctaagcccctctcaacttttcctccatggaaaacgtaacaaaactttcaaagtctcttgcaaagtttctaatagtggtgaccaaaaccaaaacaaacgaattctgttgatcgaagaaatgttcttcttggcttaggaggtctttatggtgttgctaatgctataccattagcagcatcggctactcctataccatcccctgatctcaaaacttgtggtagagccaccatatcggatggtccactagtaccctatacttgttgccccctcctcatgcaactaacttagtcaccactcatatcacaagttccattccttatgactaactcagtactcgtccctgctcccatgctgttgatgatggag

SEQ ID NO: 1576 - DNA, 544 bp, Artificial
  Mutation introduced by TALE nuclease pair POT33_T02 within a POT33 allele
caagtgtgtgcaatagtagttctactactacaactctcaaaactcctttcatttcatccaatacttctttaggttccactcctaagcccctctcaacttttcctccatggaaaacgtaacaaaactttcaaagtctcttgcaaagtttctaatagtggtgaccaaacttgcccctgggcggctccaggaagcccgacggcgccaaacgaattctgttgatcgaagaaatgttcttcttggcttaggaggtctttatggtgttgctaatgctataccattagcagcatcggctactcctataccatcccctgatctcaaaacttgtggtagagccaccatatcggatggtccactagtaccctatacttgttgccccctcctatgccactaactttgacaccattccatattacaagttcccttctatgactaaactccgtatccgtcccctgctcatgctgttgatgaggagtatattgctaagtataatttggccataagtcgaatgaaagatcttgataagacagaccctttaaaccctctt

SEQ ID NO: 1577 - DNA, 513 bp, Artificial
  Mutation introduced by TALE nuclease pair POT33_T02 within a POT33 allele
caagtgtgtgcaatagtagttctactactacaactctcaaaactcctttcatttcatccaatacttctttaggttccactcctaagccctctcaacttttcctccatggaaaacgtaacaaaactttcaaagtctcttgcaaagtttctaatagtggtgaccaaaaacgaattctgttgatcgaagaaatgttcttcttggcttaggaggtctttatggtgttgctaatgctataccattagcagcatcggctactcctataccatcccctgatctcaaaacttgtggtagagccaccatatcggatggtccactagtaccctatacttgttgcccccctcctatgccaactaactttgtacaccacttccatattcacaagttcccttcctatgactaaactccagtatccgtcccctgctccatgctgttgatgaggagtatattgctaagtataatttggccataagtcgaatgaaagatcttgataagacagaccctttaaaccctctt

SEQ ID NO: 1578 - DNA, 516 bp, Artificial
  Mutation introduced by TALE nuclease pair POT33_T02 within a POT33 allele
caagtgtgtgcaatagtagttctactactacaactctcaaaactcctttcatttcatccaatacttctttaggttccactcctaagcccctctcaacttttcctccatggaaaacgtaacaaaactttcaaagtctcttgcaaagtttctaatagtggtgaccaaaaccaaaaacgaattctgttgatcgaagaaatgttcttcttggcttaggaggtctttatggtgttgctaatgctataccattagcagcatcggctactcctataccatcccctgatcctcaaaacttgatggtagagccaccatatcggatggtccactagtaccctatacttgttgcccccctcctatgccaactaactttgacaccattccatattacaagttcccttctatgactaaactccgtatccgtcccctgctcatgctgttgatgaggagtatattgctaagtataatttggccataagtcgaatgaaagatcttgataagacagaccctttaaaccctctt

SEQ ID NO: 1579 - DNA, 520 bp, Artificial
  Mutation introduced by TALE nuclease pair POT33_T02 within a POT33 allele
caagtgtgtgcaatagtagttctactactacaactctcaaaactcctttcatttcatccaatacttctttaggttccactcctaagcccctctcaacttttcctccatggaaaacgtaacaaaactttcaaagtctcttgcaaagtttctaatagtggtgcaaccaaaaccaaattgaaacgaattctgttgatcgaagaaatgttcttcttggcttaggaggtctttatggtgttgctaatgctataccattagcagcatcggctactcctataccatcccctgatctcaaaacttgtggtagagccaccatatcggatggtccactagtaccctatacttgttgcccccctcctatgccaactaactttgacaccattccatattacaagttcccttctatgactaaactccgtatccgtcccctgctcatgctgttgatgaggagtatattgctaagtataatttggccataagtcgaatgaaagatcttgataagacagaccctttaaaccctctt

SEQ ID NO: 1580 - DNA, 518 bp, Artificial
  Mutation introduced by TALE nuclease pair POT33_T02 within a POT33 allele
caagtgtgtgcaatagtagttctactactacaactctcaaaactcctttcatttcatccaatacttctttaggttccactcctaagcccctctcaacttttcctccatggaaaacgtaacaaaactttcaaagtctcttgcaaagtttctaatagtggtgaccaaaaccaacaatcgaacattctgttgatcgaagaaatgttcttcttggcttaggaggtctttatggtgttgctaatgctataccattagcagcatcggctactcctataccatcccctgatctcaaaacttgtggtagagccaccatatcggatggtccactagtaccctatacttgttgcccccctcctatgccaactaactttgacaccattccatattacaagttcccttctatgactaaactccgtatccgtcccctgctccatgctgttgatgaggagtatattgctaagtataatttggccataagtcgaatgaaagatcttgataagacagaccctttaaaccctctt

SEQ ID NO: 1581 - DNA, 493 bp, Artificial
  Mutation introduced by TALE nuclease pair POT33_T02 within a POT33 allele
caagtgtgtgcaatagtagttctactactacaactctcaaaactcctttcatttcatccaatacttctttaggttccactcctaagccctctcaacttttcctccatggaaaacgtaacaaaactttcaaagtctcttgcaaagtttctaatagtggtgaccatgatcgaagaaatgttcttcttggcttaggaggtctttatggtgttgctaatgctataccattagcagcatcggctactcctataccatcccctgatctcaaaacttgtggtagagccaccatatcggatggtccactagtaccctatacttgttgcccccctcctatgccaactaactttgacaccattccatattacaagttcccttctatgactaaactccgtatccgtcccctgctcatgctgttgatgaggagtatattgctaagtataatttggccataagtcgaatgaaagatcttgataagacagaccctttaaaccctctt

SEQ ID NO: 1582 - DNA, 493 bp, Artificial
  Mutation introduced by TALE nuclease pair POT33_T02 within a POT33 allele
caagtgtgtgcaatagtagttctactactacaactctcaaaactcctttcatttcatccaatacttctttaggttccactcctaagcccctctcaacttttcctccatggaaaacgtaacaaaactttcaaagtctcttgcaaagtttctaatagtggtgaccaaaaccaacgaattctgttgatcgaagaaatgttcttcttggcttaggaggtctttatggtgttgctaatgctataccattagcagcatcggctactcctataccatcccctgatctcaaaacttgtggtagagccaccatatcggatggtccactagtaccctatacttgttgcccccctcctatgccaactaactttgacaccattccatattacaagttcccttctatgactaaactccgtatccgtcccctgctcatgctgttgatgaggagtatattgctaagtataatttggccataagtcgaatgaaagatcttgataagaca

SEQ ID NO: 1583 - DNA, 518 bp, Artificial
  Mutation introduced by TALE nuclease pair POT33_T02 within a POT33 allele
caagtgtgtgcaatagtagttctactactacaactctcaaaactcctttcatttcatccaatacttctttaggttccactcctaagcccctctcaacttttcctccatggaaaacgtaacaaaactttcaaagtctcttgcaaagtttctaatagtggtgaccaaaaccaaaacaaaacgaattctgttgatcgaagaaatgttcttcttggcttaggaggtctttatggtgttgctaatgctataccattagcagcatcggctactcctataccatcccctgatctcaaaacttgtggtagagccaccatatcggatggtccactagtaccctatacttgttgcccccctcctatgccaactaactttgacaccattccatattacaagttcccttctatgactaaactccgtatccgtcccctgctcatgctgttgatgaggagtatattgctaagtataatttggccataagtcgaatgaaagatcttgataagacagaccctttaaaccctctt

SEQ ID NO: 1584 - DNA, 486 bp, Artificial
  Mutation introduced by TALE nuclease pair POT33_T02 within a POT33 allele
caagtgtgtgcaatagtagttctactactacaactctcaaaactcctttcatttcatccaatacttctttaggttccactcctaagcccctctcaacttttcctccatggaaaacgtaacaaaactttcaaagtctcttgcaaagtttctaatagtggtgaccaaaaccaaaacgaattctgttgatcgaagaaatgttcttcttggcttaggaggtctttatggtgttgctaatgctataccattagcagcatcggctactcctataccatcccctgatctcaaaacttgtggtagagccaccatatcggatggtccactagtaccctatacttgttgcccccctcctcatgccaactaactttgtacaccacttccattattcacaagtttcccattcctatgactaaactccagtactccgtcccctgctccatgctgttgatgatggagtatagttgctaagtataattttggccataagtc

SEQ ID NO: 1585 - DNA, 499 bp, Artificial
  Mutation introduced by TALE nuclease pair POT33_T02 within a POT33 allele
caagtgtgtgcaatagtagttctactactacaactctcaaaactcctttcatttcatccaatacttctttaggttccactcctaagccctctcaacttttcctccatggaaaacgtaacaaaactttcaaagtctcttgcaaagtttctaatagtggtgaccaaaaccaaaacgaattctgttgatcgaagaaatgttcttcttggcttaggaggtctttatggtgttgctaatgctataccattagcagcatcggctactcctataccatcccctgatctcaaaacttgtggtagagccaccatatcggatggtccactagtaccctatacttgttgcccccctcctatgccaactaactttgtacaccacttccatattcacaagtttcccttcctatgactaaactcagtactccgtcccctgctccatgctgttgatgatggagtatattgctaagtataattttggccataagtcgaatgaaagatcttgataa

SEQ ID NO: 1586 - DNA, 512 bp, Artificial
  Mutation introduced by TALE nuclease pair POT33_T02 within a POT33 allele
caagtgtgtgcaatagtagttctactactacaactctcaaaactcctttcatttcatccaatacttctttaggttccactcctaagccctctcaacttttcctccatggaaaacgtaacaaaactttcaaagtctcttgcaaagtttctaatagtggtgaccaaaaccaaaacaaattctgttgatcgaagaaatgttcttcttggcttaggaggtctttatggtgttgctaatgctataccattagcagcatcggctactcctataccatcccctgatctcaaaacttgtggtagagccaccatatcggatggtccactagtaccctatacttgttgcccccctcctatgccaactaactttgacaccattccatattacaagttcccttctatgactaaactccgtatccgtcccctgctcatgctgttgatgaggagtatattgctaagtataatttggccataagtcgaatgaaagatcttgataagacagaccctttaaaccctctt

SEQ ID NO: 1587 - DNA, 512 bp, Artificial
  Mutation introduced by TALE nuclease pair POT33_T02 within a POT33 allele
caagtgtgtgcaatagtagttctactactacaactctcaaaactcctttcatttcatccaatacttctttaggttccactcctaagcccctctcaacttttcctccatggaaaacgtaacaaaactttcaaagtctcttgcaaagtttctaatagtgtgaccaaaccaaaacacgaattctgttgatcgaagaaatgttcttcttggcttaggaggtctttatggtgttgctaatgctataccattagcagcatcggctactcctataccatcccctgatctcaaaacttgtggtagagccaccatatcggatggtccactagtaccctatacttgttgcccccctcctatgccaactaactttgacaccattccatattacaagttcccttctatgactaaactccgtatccgtcccctgctcatgctgttgatgaggagtatattgctaagtataatttggccataagtcgaatgaaagatcttgataagacagaccctttaaaccctct

SEQ ID NO: 1588 - DNA, 500 bp, Artificial
  Mutation introduced by TALE nuclease pair POT33_T02 within a POT33 allele
caagtgtgtgcaatagtagttctactactacaactctcaaaactcctttcatttcatccaatacttctttaggttccactcctaagcccctctcaacttttcctccatggaaaacgtaacaaaactttcaaagtctcttgcaaagtttctaatagtggtgaccaaaaccaaaacaaattctgttgatcgaagaaatgttcttcttggcttaggaggtctttatggtgttgctaatgctataccattagcagcatcggctactcctataccatcccctgatctcaaaacttgtggtagagccaccatatcggatggtccactagtaccctatacttgttgcccccctcctatgccaactaactttgacaccattccatattacaagttcccttctatgactaaactccgtatccgtcccctgctcatgctgttgatgaggagtatattgctaagtataatttggccataagtcgaatgaaagatcttgataagacagaccc

SEQ ID NO: 1589 - DNA, 465 bp, Artificial
  Mutation introduced by TALE nuclease pair POT33_T02 within a POT33 allele
caagtgtgtgcaatagtagttctactactacaactctcaaaactcctttcatttcatccaatacttctttaggttccactcctaagccctctcaacttttcctccatggaaaacgtaacaaaactttcaaagtctcttgcaaagtttctaatagtggtgaccgaattctgttgatcgaagaaatgttcttcttggcttaggaggtctttatggtgttgctaatgctataccattagcagcatcggctactcctataccatcccctgatctcaaaacttgtggtagagccaccatatcggatggtccactagtaccctatacttgttgcccccctcctcatgccaactaactttgtacaccacttccattattcacaagtttcccatttccttatgactaaactccagtactccgtcccctgctccatgctgttgatgatggagtatagttgctaagtataatttt

SEQ ID NO: 1590 - DNA, 426 bp, Artificial
  Mutation introduced by TALE nuclease pair POT33_T02 within a POT33 allele
caagtgtgtgcaatagtagttctactactacaactctcaaaactcctttcatttcatccaatacttctttaggttccactcctaagcccctctcaacttttcctccatggaaaacgtaacaaaactttcaaagtctcttgcaaagtttctaattgctaatgctataccattagcagcatcggctactcctataccatcccctgatctcaaaacttgtggtagagccaccatatcggatggtccactagtaccctatacttgttgcccccctcctatgccaactaactttgacaccattccatattacaagttcccttctatgactaaactccgtatccgtccccctgctcatgctgttgatgaggagtatattgctaagtataatttggccataagtcgaatgaaagatcttgataagacagaccc

SEQ ID NO: 1591 - DNA, 511 bp, Artificial
  Mutation introduced by TALE nuclease pair POT33_T02 within a POT33 allele
caagtgtgtgcaatagtagttctactactacaactctcaaaactcctttcatttcatccaatacttctttaggttccactcctaagcccctctcaacttttcctccatggaaaacgtaacaaaactttcaaagtctcttgcaaagtttctaatagtggtgaccaaaaccaattgaattctgttgatcgaagaaatgttcttcttggcttaggaggtctttatggtgttgctaatgctataccattagcagcatcggctactcctataccatcccctgatctcaaaacttgtggtagagccaccatatcggatggtccactagtaccctatacttgttgcccccctcctatgccaactaactttgacaccattccatattacaagttcccttctatgactaaactccgtatccgtcccctgctcatgctgttgatgaggagtatattgctaagtataatttggccataagtcgaatgaaagatcttgataagacagaccctttaaaccctct

SEQ ID NO: 1592 - DNA, 512 bp, Artificial
  Mutation introduced by TALE nuclease pair POT33_T02 within a POT33 allele
caagtgtgtgcaatagtagttctactactacaactctcaaaactcctttcatttcatccaatacttctttaggttccactcctaagcccctctcaacttttcctccatggaaaacgtaacaaaactttcaaagtctcttgcaaagtttctaatagtggtgaccaaaaccaacgaattctgttgatcgaagaaatgttcttcttggcttaggaggtctttatggtgttgctaatgctataccattagcagcatcggctactcctataccatcccctgatctcaaaacttgtggtagagccaccatatcggatggtccactagtaccctatacttgttgcccccctcctatgccaactaactttgacaccattccatattacaagttcccttctatgactaaactccgtatccgtcccctgctccatgctgttgatgaggagtatattgctaagtataatttggccataagtcgaatgaaagatcttgataagacagaccctttaaaccctctt

SEQ ID NO: 1593 - DNA, 518 bp, Artificial
  Mutation introduced by TALE nuclease pair POT33_T02 within a POT33 allele
caagtgtgtgcaatagtagttctactactacaactctcaaaactcctttcatttcatccaatacttctttaggttccactcctaagcccctctcaacttttcctccatggaaaacgtaacaaaactttcaaagtctcttgcaaagtttctaatagtggtgaccaaaaccaaaacgaaacgaattctgttgatcgaagaaatgttcttcttggcttaggaggtctttatggtgttgctaatgctataccattagcagcatcggctactcctataccatcccctgatctcaaaacttgtggtagagccaccatatcggatggtccactagtaccctatacttgttgcccccctcctatgccaactaactttgacaccattccatattacaagttcccttctatgactaaactccgtatccgccccctgctcatgctgttgatgaggagtatattgctaagtataatttggccataagtcgaatgaaagatcttgataagacagaccctttaaaccctctt

SEQ ID NO: 1594 - DNA, 506 bp, Artificial
  Mutation introduced by TALE nuclease pair POT33_T02 within a POT33 allele
caagtgtgtgcaatagtagttctactactacaactctcaaaactcctttcatttcatccaatacttctttaggttccactcctaagcccctctcaacttttcctccatggaaaacgtaacaaaactttcaaagtctcttgcaaagtttctaatagtggtgaccaaaaccaaaacgaattctgttgatcgaagaaatgttcttcttggcttaggaggtctttatggtgttgctaatgctataccattagcagcatcggctactcctataccatcccctgatctcaaaacttgtggtagagccaccatatcggatggtccactagtaccctatacttgttgcccccctcctatgccaactaactttgtacaccattccatattcacaagttcccttcctatgactaaactccagtactccgtcccctgctccatgctgttgatgaggagtatattgctaagtataatttggccataagtcgaatgaaagatcttgataagacagaccc

SEQ ID NO: 1595 - DNA, 469 bp, Artificial
  Mutation introduced by TALE nuclease pair POT33_T02 within a POT33 allele
caagtgtgtgcaatagtagttctactactacaactctcaaaactcctttcatttcatccaatacttctttaggttccactcctaagccctctcaacttttcctccatggaaaacgtaacaaaactttcaaagtctcttgcaaagtttctaatagtggtgaccaaaaccaaaaactgaaattctgttgatcgaagaaatgttcttcttggcttaggaggtctttatggtgttgctaatgctataccattagcagcatcggctactcctataccatcccctgatctcaaaacttgtggtagagccaccatatcggatggtccactagtaccctatacttgttgcccccctcctcatgccaactaactttgtacaccacttccatattcacaagttcccttcctatgactaaactcagtactccgtcccctgctccatgctgttgatgatggagtatagttgctaagtataa

SEQ ID NO: 1596 - DNA, 507 bp, Artificial
  Mutation introduced by TALE nuclease pair POT33_T02 within a POT33 allele
caagtgtgtgcaatagtagttctactactacaactctcaaaactcctttcatttcatccaatacttctttaggttccactcctaagccctctcaacttttcctccatggaaaacgtaacaaaactttcaaagtctcttgcaaagtttctaatagtggtgaccaaaaacgaattctgttgatcgaagaaatgttcttcttggcttaggaggtctttatggtgttgctaatgctataccattagcagcatcggctactcctataccatcccctgatctcaaaacttgtggtagagccaccatatcggatggtccactagtaccctatacttgttgcccccctcctatgccaactaactttgacaccattccatattacaagttcccttctatgactaaactccgtatccgtcccctgctcatgctgttgatgaggagtatattgctaagtataatttggccataagtcgaatgaaagatcttgataagacagaccctttaaaccctctt

SEQ ID NO: 1597 - DNA, 517 bp, Artificial
  Mutation introduced by TALE nuclease pair POT33_T02 within a POT33 allele
caagtgtgtgcaatagtagttctactactacaactctcaaaactcctttcatttcatccaatacttctttaggttccactcctaagcccctctcaacttttcctccatggaaaacgtaacaaaactttcaaagtctcttgcaaagtttctaatagtggtgaccaaaaccaattgaattctgttgatcgaagaaatgttcttcttggcttaggaggtctttatggtgttgctaatgctataccattagcagcatcggctactcctataccatcccctgatctcaaaacttgtggtagagccaccatatcggatggtccactagtaccctatacttgttgcccccctcctatgccaactaactttgtacaccattccattattcacaagttcccttcctatgactaaactccagtatccgtcccctgctccatgctgttgatgaggagtatattgctaagtataatttggccataagtcgaatgaaagatcttgataagacagaccctttaaaccctct

SEQ ID NO: 1598 - DNA, 468 bp, Artificial
  Mutation introduced by TALE nuclease pair POT33_T02 within a POT33 allele
caagtgtgtgcaatagtagttctactactacaactctcaaaactcctttcatttcatccaatacttctttaggttccactcctaagcccctctcaacttttcctccatggaaaacgtaacaaaactttcaaagtaacgaattctgttgatcgaagaaatgttcttcttggcttaggaggtctttatggtgttgctaatgctataccattagcagcatcggctactcctataccatcccctgatctcaaaacttgtggtagagccaccatatcggatggtccactagtaccctatacttgttgcccccctcctatgccaactaacctttgaacatccattcccattattacaagttccccttcttcatgactaaactccgtatccgtccccctgcctcatgctgttgatgaggagtatattgctaagtataattttggccataagtcgaatgaaagatcttgataagac

SEQ ID NO: 1599 - DNA, 511 bp, Artificial
  Mutation introduced by TALE nuclease pair POT33_T02 within a POT33 allele
caagtgtgtgcaatagtagttctactactacaactctcaaaactcctttcatttcatccaatacttctttaggttccactcctaagcccctctcaacttttcctccatggaaaacgtaacaaaactttcaaagtctcttgcaaagtttctaatagtggtgaccaaaaccaaaacattctgttgatcgaagaaatgttcttcttggcttaggaggtctttatggtgttgctaatgctataccattagcagcatcggctactcctataccatcccctgatctcaaaacttgtggtagagccaccatatcggatggtccactagtaccctatacttgttgcccccctcctatgccaactaactttgacaccattccatattacaagttcccttctatgactaaactccgtatccgtcccctgctcatgctgttgatgaggagtatattgctaagtataatttggccataagtcgaatgaaagatcttgataagacagaccctttaaaccctctt

SEQ ID NO: 1600 - DNA, 508 bp, Artificial
  Mutation introduced by TALE nuclease pair POT33_T02 within a POT33 allele
caagtgtgtgcaatagtagttctactactacaactctcaaactcctttcatttcatccaatacttctttaggttccactcctaagcccctctcaacttttcctccatggaaaacgtaacaaaactttcaaagtctcttgcaaagtttctaatagtggtgaccaaaacgaattctgttgatcgaagaaatgttcttcttggcttaggaggtctttatggtgttgctaatgctataccattagcagcatcggctactcctataccatcccctgatctcaaaacttgtggtagagccaccatatcggatggtccactagtaccctatacttgttgcccccctcctatgccaactaactttgacaccattccatattcacaagttcccttctatgactaaactccgtatccgtcccctgctccatgctgttgatgaggagtatattgctaagtataatttggccataagtcgaatgaaagatcttgataagacagaccctttaaaccctctt

SEQ ID NO: 1601 - DNA, 514 bp, Artificial
  Mutation introduced by TALE nuclease pair POT33_T02 within a POT33 allele
caagtgtgtgcaatagtagttctactactacaactctcaaaactcctttcatttcatccaatacttctttaggttccactcctaagcccctctcaacttttcctccatggaaaacgtaacaaaactttcaaagtctcttgcaaagtttctaatagtggtgaccaacaattgaaacgaattctgttgatcgaagaaatgttcttcttggcttaggaggtctttatggtgttgctaatgctataccattagcagcatcggctactcctataccatcccctgatctcaaaacttgtggtagagccaccatatcggatggtccactagtaccctatacttgttgcccccctcctatgccaactaactttgacaccattccatattacaagttcccttctatgactaaactccgtatccgtcccctgctcatgctgttgatgaggagtatattgctaagtataatttggccataagtcgaatgaaagatcttgataagacagaccctttaaaccctctt

SEQ ID NO: 1602 - DNA, 512 bp, Artificial
  Mutation introduced by TALE nuclease pair POT33_T02 within a POT33 allele
caagtgtgtgcaatagtagttctactactacaactctcaaaactcctttcatttcatccaatacttctttaggttccactcctaagccctctcaacttttcctccatggaaaacgtaacaaaactttcaaagtctcttgcaaagtttctaatagtggtgaccaaaaccaaaacgaattctgttgatcgaagaaatgttcttcttggcttaggaggtctttatggtgttgctaatgctataccattagcagcatcggctactcctataccatcccctgatctcaaaacttgtggtagagccaccatatcggatggtccactagtaccctatacttgttgcccccctcctatgccaactaactttgacaccattccatattacaagttcccttctatgactaaactccgtatccgtcccctgctcatgctgttgatgaggagtatattgctaagtataatttggccataagtcgaatgaaagatcttgataagacagaccctttaaaccctctt

SEQ ID NO: 1603 - DNA, 515 bp, Artificial
  Mutation introduced by TALE nuclease pair POT33_T02 within a POT33 allele
caagtgtgtgcaatagtagttctactactacaactctcaaaactcctttcatttcatccaatacttctttaggttccactcctaagccctctcaacttttcctccatggaaaacgtaacaaaactttcaaagtctcttgcaaagtttctaatagtggtgaccaaaaccaaaacaacgaattctgttgatcgaagaaatgttcttcttggcttaggaggtctttatggtgttgctaatgctataccattagcagcatcggctactcctataccatcccctgatctcaaaacttgtggtagagccaccatatcggatggtccactagtaccctatacttgttgcccccctcctatgccaactaactttgacaccattccatattacaagttcccttctatgactaaactccgtatccgtcccctgctcatgctgttgatgaggagtatattgctaagtataatttggccataagtcgaatgaaagatcttgataagacagaccctttaaaccctctt

SEQ ID NO: 1604 - DNA, 453 bp, Artificial
  Mutation introduced by TALE nuclease pair POT33_T02 within a POT33 allele
caagtgtgtgcaatagtagttctactactacaactctcaaaactcctttcatttcatccaatacttctttaggttccactcctaagcccctctcaacttttcctccatggaaaacgtaacaaaactttcaaagtctcttgcaaagtttctaatagtggtgaccaaaaccaaaacaaacgaattctgttgatcgaagaaatgttcttcttggcttaggaggtctttatggtgttgctaatgctataccattagcagcatcggctactcctataccatcccctgatctcaaaacttgtggtagagccaccatatcggatggtccactagtaccctatacttgttgcccccctcctcatgccaactaactttgtacaccacttccattattcacaagtttcccattccttatgactaaactccagtactccgtcccctgctccatgctgttgatga

SEQ ID NO: 1605 - DNA, 499 bp, Artificial
  Mutation introduced by TALE nuclease pair POT33_T02 within a POT33 allele
caagtgtgtgcaatagtagttctactactacaactctcaaaactcctttcatttcatccaatacttctttaggttccactcctaagcccctctcaacttttcctccatggaaaacgtaacaaaactttcaaagtctcttgcaaagtttctaatagtggtgaccaaaaccaaacgaattctgttgatcgaagaaatgttcttcttggcttaggaggtctttatggtgttgctaatgctataccattagcagcatcggctactcctataccatcccctgatctcaaaacttgtggtagagccaccatatcggatggtccactagtaccctatacttgttgcccccctcctatgccaactaactttgacaccattccatattacaagttcccttctatgactaaactccgtatccgtcccctgctcatgctgttgatgaggagtatattgctaagtataatttggccataagtcgaatgaaagatcttgataagacagaccc

SEQ ID NO: 1606 - DNA, 462 bp, Artificial
  Mutation introduced by TALE nuclease pair POT33_T02 within a POT33 allele
caagtgtgtgcaatagtagttctactactacaactctcaaaactcctttcatttcatccaatacttctttaggttccactcctaagcccctctcaacttttcctccatggaaaacgtaacaaaactttcaaagtctcttgcaaagtttctaatagtggtgaccaaaaccaaaacgaattctgttgatcgaagaaatgttcttcttggcttaggaggtctttatggtgttgctaatgctataccattagcagcatcggctactcctataccatcccctgatctcaaaacttgtggtagagccaccatatcggatggtccactagtaccctatacttgttgcccccctcctcatgccaactaactttgtacaccacttccattattcacaagttcccattcctatgactaaactccagtactccgtcccctgctccatgctgttgatgatggagtatagttgct

SEQ ID NO: 1607 - DNA, 474 bp, Artificial
  Mutation introduced by TALE nuclease pair POT33_T02 within a POT33 allele
caagtgtgtgcaatagtagttctactactacaactctcaaaactcctttcatttcatccaatacttctttaggttccactcctaagcccctctcaacttttcctccatggaaaacgtaacaaaactttcaaagtctcttgcaaagtttctaatagtggtgaccaaaaccaattgaattctgttgatcgaagaaatgttcttcttggcttaggaggtctttatggtgttgctaatgctataccattagcagcatcggctactcctataccatcccctgatctcaaaacttgtggtagagccaccatatcggatggtccactagtaccctatacttgttgcccccctcctcatgccaactaactttagtacaccacttccattattcacaagtttcccattcctatgactaaactccagtactccgtcccctgctccatgctgttgatgaggagtatagttgctaagtataatttt

SEQ ID NO: 1608 - DNA, 511 bp, Artificial
  Mutation introduced by TALE nuclease pair POT33_T02 within a POT33 allele
caagtgtgtgcaatagtagtcctactactacaactctcaaaactcctttcatttcatccaatacttctttaggttccactcctaagcccctctcaacttttcctccatggaaaacgtaacaaaactttcaaagtctcttgcaaagtttctaatagtggtgaccaaaaccaaaacaattctgttgatcgaagaaatgttcttcttggcttaggaggtctttatggtgttgctaatgctataccattagcagcatcggctactcctataccatcccctgatctcaaaacttgtggtagagccaccatatcggatggtccactagtaccctatacttgttgcccccctcctatgccaactaactttgacaccattccatattacaagttcccttctatgactaaactccgtatccgtcccctgctcatgctgttgatgaggagtatattgctaagtataatttggccataagtcgaatgaaagatcttgataagacagaccctttaaaccctct

SEQ ID NO: 1609 - DNA, 518 bp, Artificial
  Mutation introduced by TALE nuclease pair POT33_T02 within a POT33 allele
caagtgtgtgcaatagtagttctactactacaactctcaaaactcctttcatttcatccaatacttctttaggttccactcctaagcccctctcaacttttcctccatggaaaacgtaacaaaactttcaaagtctcttgcaaagttctaatagtgtgacaaaccaaacagaattctgttgatcgaagaaatgttcttcttggcttaggaggtctttatggtgttgctaatgctataccattagcagcatcggctactcctataccatcccctgatctcaaaacttgtggtagagccaccatatcggatggtccactagtaccctatacttgttgcccccctcctatgccaactaacttttgtacaccacttccattattcacaagtttcccttcctatgactaaactccagtatccgtcccctgctccatgctgttgatgaggagtatattgctaagtataatttggccataagtcgaatgaaagatcttgataagacagaccctttaaaccctctt

SEQ ID NO: 1610 - DNA, 513 bp, Artificial
  Mutation introduced by TALE nuclease pair POT33_T02 within a POT33 allele
caagtgtgtgcaatagtagttctactactacaactctcaaaactcctttcatttcatccaatacttctttaggttccactcctaagcccctttcaacttttcctccatggaaaacgtaacaaaactttcaaagtctcttgcaaagtttctaatagtggtgaccaaaaccaaaacgaattctgttgatcgaagaaatgttcttcttggcttaggaggtctttatggtgttgctaatgctataccattagcagcatcggctactcctataccatcccctgatctcaaaacttgtggtagagccaccatatcggatggtccactagtaccctatacttgttgcccccctcctatgccaactaactttgacaccattccatattacaagttcccttctatgactaaactccgtatccgtcccctgctcatgctgttgatgaggagtatattgctaagtataatttggccataagtcgaatgaaagatcttgataagacagaccctttaaaccctctt

SEQ ID NO: 1611 - DNA, 511 bp, Artificial
  Mutation introduced by TALE nuclease pair POT33_T02 within a POT33 allele
caagtgtgtgcaatagtagttctactactacaactctcaaaactcctttcatttcatccaatacttctttaggttccactcctaagcccctctcaacttttcctccatggaaaacgtaacaaaactttcaaagtctcttgcaaagtttctaatagtggtgaccaaaataacgaattctgttgatcgaagaaatgttcttcttggcttaggaggtctttatggtgttgctaatgctataccattagcagcatcggctactcctataccatcccctgatctcaaaacttgtggtagagccaccatatcggatggtccactagtaccctatacttgttgcccccctcctatgccaactaactttgacaccattccatattacaagttcccttctatgactaaactccgtatccgtcccctgctccatgctgttgatgaggagtatattgctaagtataatttggccataagtcgaatgaaagatcttgataagacagaccctttaaaccctctt

SEQ ID NO: 1612 - DNA, 516 bp, Artificial
  Mutation introduced by TALE nuclease pair POT33_T02 within a POT33 allele
caagtgtgtgcaatagtagttctactactacaactctcaaaactcctttcatttcatccaatacttctttaggttccactcctaagcccctctcaacttttcctccatggaaaacgtaacaaaactttcaaagtctcttgcaaagtttctaatagtggtgaccaaaaccaaaactgaaattctgttgatcgaagaaatgttcttcttggcttaggaggtctttatggtgttgctaatgctataccattagcagcatcggctactcctataccatcccctgatctcaaaacttgtggtagagccaccatatcggatggtccactagtaccctatacttgttgcccccctcctatgccaactaactttgtacaccacttccatattcacaagtttcccttcctatgactaaactccagtactccgtcccctgctccatgctgttgatgaggagtatagttgctaagtataattttggccataaagtcgaattgcaaagatcttgaataagacagaccc

SEQ ID NO: 1613 - DNA, 511 bp, Artificial
  Mutation introduced by TALE nuclease pair POT33_T02 within a POT33 allele
caagtgtgtgcaatagtagttctactactacaactctcaaaactcctttcatttcatccaatacttctttaggttccactcctaagcccctctcaacttttcctccatggaaaacgtaacaaaactttcaaagtctcttgcaaagtttctaatagtggtgaccaaaaccaaaacgaattctgttgatcgaagaaatgttcttcttggcttaggaggtctttatggtgttgctaatgctataccattagcagcatcggctactcctataccatcccctgatctcaaaacttgtggtagagccaccatatcggatggtccactagtaccctatacttgttgcccccctcctatgccaactaactttgtacaccattccatattcacaagttcccttcctatgactaaactccagtatccgtcccctgctccatgctgttgatgaggagtatattgctaagtataatttggccataagtcgaatgaaagatcttgataagacagaccctttaaa

SEQ ID NO: 1614 - DNA, 493 bp, Artificial
  Mutation introduced by TALE nuclease pair POT33_T02 within a POT33 allele
caagtgtgtgcaatagtagttctactactacaactctcaaaactcctttcatttcatccaatacttctttaggttccactcctaagcccctctcaacttttcctccatggaaaacgtaacaaaactttcaaagtctcttgcaaagtttctaatagtggtgaccgatcgaagaaatgttcttcttggcttaggaggtctttatggtgttgctaatgctataccattagcagcatcggctactcctataccatcccctgatctcaaaacttgtggtagagccaccatatcggatggtccactagtaccctatacttgttgcccccctcctatgccaactaactttgacaccattccatattactaagttcccttctatgactaactaccgtctcgtccctcgctccatgctgttgatgtaggagtagtattgcttcaagatataatttggccataagtcgaatgaaagatcttgataagcagaccctttaaaccc

SEQ ID NO: 1615 - DNA, 512 bp, Artificial
  Mutation introduced by TALE nuclease pair POT33_T02 within a POT33 allele
caagtgtgtgcaatagtagttctactactacaactctcaaaactcctttcatttcatccaatacttctttaggttccactcctaagcccctctcaacttttcctccatggaaaacgtaacaaaactttcaaagtctcttgcaaagtttctaatagtggtgaccaaaaccaattgaattctgttgatcgaagaaatgttcttcttggcttaggaggtctttatggtgttgctaatgctataccattagcagcatcggctactcctataccatcccctgatctcaaaacttgtggtagagccaccatatcggatggtccactagtaccctatacttgttgcccccctcctatgccaactaactttgacaccattccatattacaagttcccttctatgactaaactccgtatccgtcccctgctcatgctgttgatgaggagtatattgctaagtataatttggccataagtcgaatgaaagatcttgataagacagaccctttaaaccctctt

SEQ ID NO: 1616 - DNA, 520 bp, Artificial
  Mutation introduced by TALE nuclease pair POT33_T02 within a POT33 allele
caagtgtgtgcaatagtagttctactactacaactctcaaaactcctttcatttcatccaatacttctttaggttccactcctaagcccctctcaacttttcctccatggaaaacgtaacaaaactttcaaagtctcttgcaaagtttctaatagtggtgaccaaaaccaaaacgaaacgaattctgttgatcgaagaaatgttcttcttggcttaggaggtctttatggtgttgctaatgctataccattagcagcatcggctactcctataccatcccctgatctcaaaacttgtggtagagccaccatatcggatggtccactagtaccctatacttgttgcccccctcctatgccaactaactttgacaccattccatattacaagcttcccttctatgactaaactccgtatccgccccctgctcatgctgttgatgaggagtatattgctaaagtataatttggccataagtcgaatgaaagatcttgataagacagaccctttaaaccctctt

SEQ ID NO: 1617 - DNA, 507 bp, Artificial
  Mutation introduced by TALE nuclease pair POT33_T02 within a POT33 allele
caagtgtgtgcaatagtagttctactactacaactctcaaaactcctttcatttcatccaatacttctttaggttccactcctaagccctctcaacttttcctccatggaaaacgtaacaaaactttcaaagtctcttgcaaagtttctaatagtggtgaccaaaaccaaattctgttgatcgaagaaatgttcttcttggcttaggaggtctttatggtgttgctaatgctataccattagcagcatcggctactcctataccatcccctgatctcaaaacttgtggtagagccaccatatcggatggtccactagtaccctatacttgttgcccccctcctatgccaactaactttgacaccattccatattacaagttcccttctatgactaaactccgtatccgtcccctgctcatgctgttgatgaggagtatattgctaagtataatttggccataagtcgaatgaaagatcttgataagacagaccctttaaaccctctt

SEQ ID NO: 1618 - DNA, 519 bp, Artificial
  Mutation introduced by TALE nuclease pair POT33_T02 within a POT33 allele
caagtgtgtgcaatagtagttctactactacaactctcaaaactcctttcatttcatccaatacttctttaggttccactcctaagcccctctcaacttttcctccatggaaaacgtaacaaaactttcaaagtctcttgcaaagtttctaatagtggtgaccaaaaccaaaacgaattctgttgatcgaagaaatgttcttcttggcttaggaggtctttatggtgttgctaatgctataccattagcagcatcggctactcctataccatcccctgatctcaaaacttgtggtagagccaccatatcggatggtccactagtaccctatacttgttgcccccctcctatgccaactaactttgtacaccacttccatattcacaagttcccttcctatgactaaactccagtatccgtcccctgctccatgctgttgatgaggagtatattgctaagtataatttggccataagtcgaatgaaagatcttgataagacagaccctttaaaccctctt

SEQ ID NO: 1619 - DNA, 445 bp, Artificial
  Mutation introduced by TALE nuclease pair POT33_T02 within a POT33 allele
caagtgtgtgcaatagtagttctactactacaactctcaaaactcctttcatttcatccaatacttctttaggttccactcctaagcccctctcaacttttcctccatggaaaacgtaacaaaactttcaaagtctcttgcaaagtttctaatagtggtgaccaaaaccaaaacgaattctgttgatcgaagaaatgttcttcttggcttaggaggtctttatggtgttgctaatgctataccattagcagcatcggctactcctataccatcccctgatctcaaaacttgtggtagagccaccatatcggatggtccactagtaccctatacttgttgcccccctcctatgccaactaactttgtacaccacttccatattcacaagttcccttccttatgactaaactccagtactccgtcccctgctccatgctgttgatga

SEQ ID NO: 1620 - DNA, 512 bp, Artificial
  Mutation introduced by TALE nuclease pair POT33_T02 within a POT33 allele
caagtgtgtgcaatagtagttctactactacaactctcaaaactcctttcatttcatccaatacttctttaggttccactcctaagcccctctcaacttttcctccatggaaaacgtaacaaaactttcaaagtctcttgcaaagtttctaatagtggtgaccaaaaccaaacgaattctgttgatcgaagaaatgttcttcttggcttaggaggtctttatggtgttgctaatgctataccattagcagcatcggctactcttataccatcccctgatctcaaaacttgtggtagagccaccatatcggatggtccactagtaccctatacttgttgcccccctcctatgccaactaactttgacaccattccatattacaagttcccttctatgactaaactccgtatccgtcccctgctcatgctgttgatgaggagtatattgctaagtataatttggccataagtcgaatgaaagatcttgataagacagaccctttaaaccctctt

SEQ ID NO: 1621 - DNA, 512 bp, Artificial
  Mutation introduced by TALE nuclease pair POT33_T02 within a POT33 allele
caagtgtgtgcaatagtagttctactactacaactctcaaaactcctttcatttcatccaatacttctttaggttccactcctaagcccctctcaacttttcctccatggaaaacgtaacaaaactttcaaagtctcttgcaaagtttctaatagtggtgaccaaaaccaaacgaattctgttgatcgaagaaatgttcttcttggcttaggaggtctttatggtgttgctaatgctataccattagcagcatcggctactcctataccatcccctgatctcaaaacttgtggtagagccaccatatcggatggtccactagtaccctatacttgttgcccccctcctatgccaactaactttgacaccattccatattacaagttcccttctatgactaaactccgtatccgccccctgctcatgctgttgatgaggagtatattgctaagtataatttggccataagtcgaatgaaagatcttgataagacagaccctttaaaccctctt

SEQ ID NO: 1622 - DNA, 513 bp, Artificial
  Mutation introduced by TALE nuclease pair POT33_T02 within a POT33 allele
caagtgtgtgcaatagtagttctactactacaactctcaaaactcctttcatttcatccaatacttctttaggttccactcctaagcccctctcaacttttcctccatggaaaacgtaacaaaactttcaaagtctcttgcaaagtttctaatagtggtgaccaaaaccaaaacgaattctgttgatcgaagaaatgttcttcttggcttaggaggtctttatggtgttgctaatgctataccattagcagcatcggctactcctataccatcccctgatctcaaaacttgtggtagagccaccatatcggatggtccactagtaccctatacttgttgcccccctcctatgccaactaactttgacaccgttccatattacaagttcccttctatgactaaactccgtatccgtcccctgctcatgctgttgatgaggagtatattgctaagtataatttggccataagtcgaatgaaagatcttgataagacagaccctttaaaccctctt

SEQ ID NO: 1623 - DNA, 489 bp, Artificial
  Mutation introduced by TALE nuclease pair POT33_T02 within a POT33 allele
caagtgtgtgcaatagtagttctactactacaactctcaaaactcctttcatttcatccaatacttctttaggttccactcctaagcccctctcaacttttcctccatggaaaacgtaacaaaactttcaaagtctcttgcaaagtttctaatgatcgttgatcgaagaaatgttcttcttggcttaggaggtctttatggtgttgctaatgctataccattagcagcatcggctactcctataccatcccctgatctcaaaacttgtggtagagccaccatatcggatggtccactagtaccctatacttgttgcccccctcctatgccaactaactttgacaccattccatattacaagttcccttctatgactaaactccgtatccgtcccctgctcatgctgttgatgaggagtatattgctaagtataatttggccataagtcgaatgaaagatcttgataagacagaccctttaaaccctctt

SEQ ID NO: 1624 - DNA, 476 bp, Artificial
  Mutation introduced by TALE nuclease pair POT33_T02 within a POT33 allele
caagtgtgtgcaatagtagttctactactacaactctcaaaactcctttcatttcatccaatacttctttaggttccactcctaagcccctctcaacttttcctccatggaaaacgtaacaaaactttcaaagtctcttgcaaagtttctaatagtggtgaccaaaaccaaaacgaattctgttgatcgaagaaatgttcttcttggcttaggaggtctttatggtgttgctaatgctataccattagcagcatcggctactcctataccatcccctgatctcaaaacttgtggtagagccaccatatcggatggtccactagtaccctatacttgttgcccccctcctcatgccaactaactttgtacaccacttccattattcacaagtttcccattccttatgactaaactccagtactccgtcccctgctccatgctgttgatgatggagtatagttgctaagtataatttt

SEQ ID NO: 1625 - DNA, 496 bp, Artificial
  Mutation introduced by TALE nuclease pair POT33_T02 within a POT33 allele
caagtgtgtgcaatagtagttctactactacaactctcaaaactcctttcatttcatccaatacttctttaggttccactcctaagccctctcaacttttcctccatggaaaacgtaacaaaactttcaaagtctcttgcaaagtttctaatagtggtgaccatgttgatcgaagaaatgttcttcttggcttaggaggtctttatggtgttgctaatgctataccattagcagcatcggctactcctataccatcccctgatctcaaaacttgtggtagagccaccatatcggatggtccactagtaccctatacttgttgcccccctcctatgccaactaactttgacaccattccatattacaagttcccttctatgactaaactccgtatccgtcccctgctcatgctgttgatgaggagtatattgctaagtataatttggccataagtcgaatgaaagatcttgataagacagaccctttaaaccctctt

SEQ ID NO: 1626 - DNA, 492 bp, Artificial
  Mutation introduced by TALE nuclease pair POT33_T02 within a POT33 allele
caagtgtgtgcaatagtagttctactactacaactctcaaaactcctttcatttcatccaatacttctttaggttccactcctaagcccctctcaacttttcctccatggaaaacgtaacaaaactttcaaagtctcttgcaaagtttctaatagtggtgaccgatcgaagaaatgttcttcttggcttaggaggtctttatggtgttgctaatgctataccattagcagcatcggctactcctataccatcccctgatctcaaaacttgtggtagagccaccatatcggatggtccactagtaccctatacttgttgcccccctcctatgccaactaactttgacaccattccatattacaagttcccttctatgactaaactccgtatccgtcccctgctcatgctgttgatgaggagtatattgctaagtataatttggccataagtcgaatgaaagatcttgataagacagaccctttaaaccctctt

SEQ ID NO: 1627 - DNA, 498 bp, Artificial
  Mutation introduced by TALE nuclease pair POT33_T02 within a POT33 allele
caagtgtgtgcaatagtagttctactactacaactctcaaaactcctttcatttcatccaatacttctttaggttccactcctaagccctctcaacttttcctccatggaaaacgtaacaaaactttcaaagtctcttgcaaagtttctaatagtggtgaccaatgttgattcgaagaaatgttcttcttggcttaggaggtctttatggtgttgctaatgctataccattagcagcatcggctactcctataccatcccctgatctcaaaacttgtggtagagccaccatatcggatggtccactagtaccctatacttgttgcccccctcctatgccaactaactttgacaccattccatattacaagttcccttctatgactaaactccgtatccgtcccctgctcatgctgttgatgaggagtatattgctaagtataatttggccataagtcgaatgaaagatcttgataagacagaccctttaaaccctctt

SEQ ID NO: 1628 - DNA, 517 bp, Artificial
  Mutation introduced by TALE nuclease pair POT33_T02 within a POT33 allele
caagtgtgtgcaatagtagttctactactacaactctcaaaactcctttcatttcatccaatacttctttaggttccactcctaagccctctcaacttttcctccatggaaaacgtaacaaaactttcaaagtctcttgcaaagtttctaatagtggtgaccaaaaccaaatatcgaaacattctgttgatcgaagaaatgttcttcttggcttaggaggtctttatggtgttgctaatgctataccattagcagcatcggctactcctataccatcccctgatctcaaaacttgtggtagagccaccatatcggatggtccactagtaccctatacttgttgcccccctcctatgccaactaactttgacaccattccatattacaagttcccttctatgactaaactccgtatccgtcccctgctcatgctgttgatgaggagtatattgctaagtataatttggccataagtcgaatgaaagatcttgataagacagaccctttaaaccctctt

SEQ ID NO: 1629 - DNA, 523 bp, Artificial
  Mutation introduced by TALE nuclease pair POT33_T02 within a POT33 allele
  misc_feature (448); (458): n is a or c or t or g
caagtgtgtgcaatagtagttctactactacaactctcaaaactcctttcatttcatccaatacttctttaggttccactcctaagccctctcaacttttcctccatggaaaacgtaacaaaactttcaaagtctcttgcaaagtttctaatagtggtgaccaaaaccaaaacgaaacgaattctgttgatcgaagaaatgttcttcttggcttaggaggtctttatggtgttgctaatgctataccattagcagcatcggctactcctataccatcccctgatctcaaaacttgtggtagagccaccatatcggatggtccactagtaccctatacttgttgcccccctcctatgccaactaactttgacaccattccatattacaagcttcccttctatgactaaactccgtatccgcccccccttgtcatgctgttgatgaggantatattgccnaaagtatcaatttggccataagtcgaatgaaagatcttgataagacagaccctttaaaccctctt

SEQ ID NO: 1630 - DNA, 515 bp, Artificial
  Mutation introduced by TALE nuclease pair POT33_T02 within a POT33 allele
caagtgtgtgcaatagtagttctactactacaactctcaaaactcctttcatttcatccaatacttctttaggttccactcctaagcccctctcaacttttcctccatggaaaacgtaacaaaactttcaaagtctcttgcaaagtttctaatagtggtgaccaaaaccaaaaacgaattctgttgatcgaagaaatgttcttcttggcttaggaggtctttatggtgttgctaatgctataccattagcagcatcggctactcctataccatcccctgatctcaaaacttgatggtagagccaccatatcggatggtccactagtaccctatacttgttgcccccctcctatgccaactaactttgacaccattccatattacaagttcccttctatgactaaactccgtatccgtcccctgctcatgctgttgatgaggagtatattgctaagtataatttggccataagtcgaatgaaagatcttgataagacagaccctttaaaccctctt

SEQ ID NO: 1631 - DNA, 511 bp, Artificial
  Mutation introduced by TALE nuclease pair POT33_T02 within a POT33 allele
caagtgtgtgcaatagtagttctactactacaactctcaaaactcctttcatttcatccaatacttctttaggttccactcctaagccctctcaacttttcctccatggaaaacgtaacaaaactttcaaagtctcttgcaaagtttctaatagtggtgaccaaaaccaaacgaattctgttgatcgaagaaatgttcttcttggcttaggaggtctttatggtgttgctaatgctataccattagcagcatcggctactcctataccatcccctgatctcaaaacttgtggtagagccaccatatcggatggtccactagtaccctatacttgttgcccccctcctatgccaactaactttgacaccattccatattacaagttcccttctatgactaaactccgtatccgtcccctgctcatgctgttgatgaggagtatattgctaagtataatttggccataagtcgaatgaaagatcttgataagacagaccctttaaaccctctt

SEQ ID NO: 1632 - DNA, 504 bp, Artificial
  Mutation introduced by TALE nuclease pair POT33_T02 within a POT33 allele
caagtgtgtgcaatagtagttctactactacaactctcaaaactcctttcatttcatccaatacttctttaggttccactcctaagccctctcaacctttactcctggaaaacgtaacaaaactttcaaagtctcttgcaaagtttctaatagtggtgccaaaaccaattctgttgatcgaagaaatgttcttcttggcttaggaggtctttatggtgttgctaatgctataccattagcagcatcggctactcctataccatcccctgatctcaaaacttgtggtagagccaccatatcggatggtccactagtaccctatacttgttgcccccctcctatgccaactaactttgacaccattccatattacaagttcccttctatgactaaactccgtatccgtcccctgctcatgctgttgatgaggagtatattgctaagtataatttggccataagtcgaatgaaagatcttgataagacagaccctttaaaccctctt

SEQ ID NO: 1633 - DNA, 517 bp, Artificial
  Mutation introduced by TALE nuclease pair POT33_T02 within a POT33 allele
caagtgtgtgcaatagtagttctactactacaactctcaaaactcctttcatttcatccaatacttctttaggttccactcctaagcccctctcaacttttcctccatggaaaacgtaacaaaactttcaaagtctcttgcaaagtttctaatagtggtgaccaaaaccaaatatcgaaacattctgttgatcgaagaaatgttcttcttggcttaggaggtctttatggtgttgctaatgctataccattagcagcatcggctactcctataccatcccctgatctcaaaacttgtggtagagccaccatatcggatggtccactagtaccctatacttgttgcccccctcctatgccaactaactttgacaccattccatattacaagttcccttctatgactaactccgtatccgtcccctgctcatgctgttgatgaggagtatattgctaagtataatttggccataagtcgaatgaaagatcttgataagacagaccctttaaaccctctt

SEQ ID NO: 1634 - DNA, 513 bp, Artificial
  Mutation introduced by TALE nuclease pair POT33_T02 within a POT33 allele
caagtgtgtgcaatagtagttctactactacaactctcaaaactcctttcatttcatccaatacttctttaggttccactcctaagccctctcaacttttcctccatggaaaacgtaacaaaactttcaaagtctcttgcaaagtttctaatagtggtgaccaaaaccaaaaacgaattctgttgatcgaagaaatgttcttcttggcttaggaggtctttatggtgttgctaatgctataccattagcagcatcggctactcctataccatcccctgatctcaaaacttgtggtagagccaccatatcggatggtccactagtaccctatacttgttgcccccctcctatgccaactaactttgacaccattccatattacaagttcccttctatgactaaactccgtatccgtcccctgctcatgctgttgatgaggagtatattgctaagtataatttggccataagtcgaatgaaagatcttgataagacagaccctttaaaccctctt

SEQ ID NO: 1635 - DNA, 468 bp, Artificial
  Mutation introduced by TALE nuclease pair POT33_T02 within a POT33 allele
caagtgtgtgcaatagtagttctactactacaactctcaaaactcctttcatttcatccaatacttctttaggttccactcctaagcccctctcaacttttcctccatggaaaacgtaacaaaactttcaaagtctcttgcaaagtttctaatagtggtgaccaaaaccgaattctgttgatcgaagaaatgttcttcttggcttaggaggtctttatggtgttgctaatgctataccattagcagcatcggctactcctataccatcccctgatctcaaaacttgtggtagagccaccatatcggatggtccactagtaccctatacttgttgcccccctcctcatgccaacctaactttagtacaccacttccattattcacaagttcccattccttatgactaaactccagtactccgtcccctgctccatgctgttgatgatggagtatagttgctaagtataa

SEQ ID NO: 1636 - DNA, 479 bp, Artificial
  Mutation introduced by TALE nuclease pair POT33_T02 within a POT33 allele
caagtgtgtgcaatagtagttctactactacaactctcaaaactcctttcatttcatccaatacttctttaggttccactcctaagcccctctcaacttttcctccatggaaaacgtaacaaaactttcaaagtctcttgcaaagtttctaatagtggtgaccaaaaccaaacgaattctgttgatcgaagaaatgttcttcttggcttaggaggtctttatggtgttgctaatgctataccattagcagcatcggctactcttataccatcccctgatctcaaaacttgtggtagagccaccatatcggatggtccactagtaccctatacttgttgcccccctcctcatgccaactaactttgtacaccacttccattattcacaagttcccattcctatgactaaactccagtactccgtcccctgctccatgctgttgatgatggagtatagttgctaagtataattttggccat

SEQ ID NO: 1637 - DNA, 512 bp, Artificial
  Mutation introduced by TALE nuclease pair POT33_T02 within a POT33 allele
caagtgtgtgcaatagtagttctactactacaactctcaaaactcctttcatttcatccaatacttctttaggttccactcctaagcccctctcaacttttcctccatggaaaacgtaacaaaactttcaaagtctcttgcaaagtttctaatagtggtgaccaaaaccaaaacgaattctgttgatcgaagaaatgttcttcttggcttaggaggtctttatggtgttgctaatgctataccattagcagcatcggctactcctataccatcccctgatctcaaaacttgtggtagagccaccatatcggatggtccactagtaccctatacttgttgcccccctcctatgccaactaactttgtacaccattccattattcacaagttcccttcctatgactaaactccagtatccgtcccctgctccatgctgttgatgaggagtatattgctaagtataatttggccataagtcgaatgaaagatcttgataagacagaccctttaaa

SEQ ID NO: 1638 - DNA, 451 bp, Artificial
  Mutation introduced by TALE nuclease pair POT33_T02 within a POT33 allele
caagtgtgtgcaatagtagttctactactacaactctcaaaactcctttcatttcatccaatacttcttttaggttccactcctaagcccctctcaacttttcctccatggaaaacgtaacaaaactttcaaagtctcttgcaaagtttctaatagtggtgaccaaaaccaaaatttctgttgatcgaagaaatgttcttcttggcttaggaggtctttatggtgttgctaatgctataccattagcagcatcggctactcctataccatcccctgatctcaaaacttgtggtagagccaccatatcggatggtccactagtaccctatacttgttgcccccctcctatgccaactaactttgtacaccattccattattcacaagttcccttccttatgactaaactccagtactccgtcccctgctccatgctgttgatgaggagtata

SEQ ID NO: 1639 - DNA, 502 bp, Artificial
  Mutation introduced by TALE nuclease pair POT33_T02 within a POT33 allele
caagtgtgtgcaatagtagttctactactacaactctcaaaactcctttcatttcatccaatacttctttaggttccactcctaagcccctctcaacttttcctccatggaaaacgtaacaaaactttcaaagtctcttgcaaagtttctaatagtggtgaccgaattctgttgatcgaagaaatgttcttcttggcttaggaggtctttatggtgttgctaatgctataccattagcagcatcggctactcctataccatcccctgatctcaaaacttgtggtagagccaccatatcggatggtccactagtaccctatacttgttgcccccctcctatgccaactaactttgacaccattccatattacaagttcccttctatgactaaactccgtatccgtcccctgctcatgctgttgatgaggagtatattgctaagtataatttggccataagtcgaatgaaagatcttgataagacagaccctttaaaccctctt

SEQ ID NO: 1640 - DNA, 484 bp, Artificial
  Mutation introduced by TALE nuclease pair POT33_T02 within a POT33 allele
caagtgtgtgcaatagtagttctactactacaactctcaaaactcctttcatttcatccaatacttctttaggttccactcctaagcccctctcaacttttcctccatggaaaacgtaacaaaactttcaaagtctcttgcaaagtttctaatagtggtgaccaaaaccaaacgaaacgaattctgttgatcgaagaaatgttcttcttggcttaggaggtctttatggtgttgctaatgctataccattagcagcatcggctactcctataccatcccctgatctcaaaacttgtggtagagccaccatatcggatggtccactagtaccctatacttgttgcccccctcctcatgccaactaactttgtacaccattccatattcacaagtttcccattccttatgactaaactccagtactccgtcccctgctccatgctgttgatgatggagtatagttgctaagtataattttggccat

SEQ ID NO: 1641 - DNA, 515 bp, Artificial
  Mutation introduced by TALE nuclease pair POT33_T02 within a POT33 allele
caagtgtgtgcaatagtagttctactactacaactctcaaaactcctttcatttcatccaatacttctttaggttccactcctaagcccctctcaacttttcctccatggaaaacgtaacaaaactttcaaagtctcttgcaaagtttctaatagtggtgaccaaaaccaaaacatgaattctgttgatcgaagaaatgttcttcttggcttaggaggtctttatggtgttgctaatgctataccattagcagcatcggctactcctataccatcccctgatctcaaaacttgtggtagagccaccatatcggatggtccactagtaccctatacttgttgcccccctcctatgccaactaactttgacaccattccatattacaagttcccttctatgactaaactccgtatccgtcccctgctcatgctgttgatgaggagtatattgctaagtataatttggccataagtcgaatgaaagatcttgataagacagaccctttaaaccctctt

SEQ ID NO: 1642 - DNA, 445 bp, Artificial
  Mutation introduced by TALE nuclease pair POT33_T02 within a POT33 allele
caagtgtgtgcaatagtagttctactactacaactctcaaaactcctttcatttcatccaatacttctttaggttccactcctaagcccctctcaacttttcctccatggaaaacgtaacaaaactttcaaagtctcttgcaaagtttctaatagtggtgaccaaaaccaaaacgaattctgttgatcgaagaaatgttcttcttggcttaggaggtctttatggtgttgctaatgctataccattagcagcatcggctactcctataccatcccctgatctcaaaacttgtggtagagccaccatatcggatggtccactagtaccctatacttgttgcccccctcctatgccaactaactttgtacaccacttccattattcacaagtttcccttcctatgactaaactccagtatccgtcccctgctccatgctgttgatga

SEQ ID NO: 1643 - DNA, 518 bp, Artificial
  Mutation introduced by TALE nuclease pair POT33_T02 within a POT33 allele
caagtgtgtgcaatagtagttctactactacaactctcaaaactcctttcatttcatccaatacttctttaggttccactcctaagcccctctcaacttttcctccatggaaaacgtaacaaaactttcaaagtctcttgcaaagtttctaatagtggtgaccaaaaccaaaacgaattctgttgatcgaagaaatgttcttcttggcttaggaggtctttatggtgttgctaatgctataccattagcagcatcggctactcctataccatcccctgatctcaaaacttgtggtagagccaccatatcggatggtccactagtaccctatacttgttgcccccctcctatgccaactaactttgtacaccattccatattcacaagttcccttcctatgactaaactccagtatccgtcccctgctccatgctgttgatgaggagtatattgctaagtataatttggctataagtcgaatgaaagatcttgataagacagaccctttaaaccctctt

SEQ ID NO: 1644 - DNA, 475 bp, Artificial
  Mutation introduced by TALE nuclease pair POT33_T02 within a POT33 allele
caagtgtgtgcaatagtagttctactactacaactctcaaaactcctttcatttcatccaatacttctttaggttccactcctaagcccctctcaacttttcctccatggaaaacgtaacaaaactttcaaagtctcttgcaaagtttctaatagtggtgaccaaaaccaaaacaaattctgttgatcgaagaaatgttcttcttggcttaggaggtctttatggtgttgctaatgctataccattagcagcatcggctactcctataccatcccctgatctcaaaacttgtggtagagccaccatatcggatggtccactagtaccctatacttgttgcccccctcctatgccaactaactttgtacaccacttccattattcacaagtttcccttccttatgactaaactccagtatccgtcccctgctccatgctgttgatgatggagtatagttgctaagtataattttgg

SEQ ID NO: 1645 - DNA, 501 bp, Artificial
  Mutation introduced by TALE nuclease pair POT33_T02 within a POT33 allele
caagtgtgtgcaatagtagttctactactacaactctcaaaactcctttcatttcatccaatacttctttaggttccactcctaagccctctcaacttttcctccatggaaaacgtaacaaaactttcaaagtctcttgcaaagtttctaatagtggtgaccgaattctgttgatcgaagaaatgttcttcttggcttaggaggtctttatggtgttgctaatgctataccattagcagcatcggctactcctataccatcccctgatctcaaaacttgtggtagagccaccatatcggatggtccactagtaccctatacttgttgcccccctcctatgccaactaactttgacaccattccatattacaagttcccttctatgactaaactccgtatccgtcccctgctcatgctgttgatgaggagtatattgctaagtataatttggccataagtcgaatgaaagatcttgataagacagaccctttaaaccctctt

SEQ ID NO: 1646 - DNA, 515 bp, Artificial
  Mutation introduced by TALE nuclease pair POT33_T02 within a POT33 allele
caagtgtgtgcaatagtagttctactactacaactctcaaaactcctttcatttcatccaatacttctttaggttccactcctaagccctctcaacttttcctccatggaaaacgtaacaaaactttcaaagtctcttgcaaagtttctaatagtggtgaccaaaaccaaaacaattctgttgatcgaagaaatgttcttcttggcttaggaggtctttatggtgttgctaatgctataccattagcagcatcggctactcctataccatcccctgatctcaaaacttgtggtagagccaccatatcggatggtccactagtaccctatacttgttgcccccctcctatgccaactaactttgacaccattccatattcacaagttcccttcctatgactaaactccagtatccgtcccctgctccatgctgttgatgaggagtatattgctaagtataatttggccataagtcgaatgaaagatcttgataagacagaccctttaaaccctctt

SEQ ID NO: 1647 - DNA, 517 bp, Artificial
  Mutation introduced by TALE nuclease pair POT33_T02 within a POT33 allele
caagtgtgtgcaatagtagttctactactacaactctcaaaactcctttcatttcatccaatacttctttaggttccactcctaagcccctctcaacttttcctccatggaaaacgtaacaaaactttcaaagtctcttgcaaagtttctaatagtggtgaccaaaaccaaatgaaacgattctgttgatcgaagaaatgttcttcttggcttaggaggtctttatggtgttgctaatgctataccattagcagcatcggctactcctataccatcccctgatctcaaaacttgtggtagagccaccatatcggatggtccactagtaccctatacttgttgcccccctcctatgccaactaactttgacaccattccatattacaagttcccttcctatgactaaactccgtatccgtcccctgctcatgctgttgatgaggagtatattgctaagtataatttggccataagtcgaatgaaagatcttgataagacagaccctttaaaccctctt

SEQ ID NO: 1648 - DNA, 453 bp, Artificial
  Mutation introduced by TALE nuclease pair POT33_T02 within a POT33 allele
caagtgtgtgcaatagtagttctactactacaactctcaaaactcctttcatttcatccaatacttctttaggttccactcctaagcccctctcaacttttcctccatggaaaacgtaacaaaactttcaaagtctcttgcaaagtttctaatagtggtgaccaaaaccaaaaacgaattctgttgatcgaagaaatgttcttcttggcttaggaggtctttatggtgttgctaatgctataccattagcagcatcggctactcctataccatcccctgatctcaaaacttgtggtagagccaccatatcggatggtccactagtaccctatacttgttgcccccctcctcatgccaactaactttgtacaccacttccattattcacaagttcccttcctatgactaaactccagtatccgtcccctgctccatgctgttgatgaggagtat

SEQ ID NO: 1649 - DNA, 501 bp, Artificial
  Mutation introduced by TALE nuclease pair POT33_T02 within a POT33 allele
caagtgtgtgcaatagtagttctactactacaactctcaaaactcctttcatttcatccaatacttctttaggttccactcctaagcccctctcaacttttcctccatggaaaacgtaacaaaactttcaaagtctcttgcaaagtttctaatagtggtgaccaaaaccaaaacaaattctgttgatcgaagaaatgttcttcttggcttaggaggtctttatggtgttgctaatgctataccattagcagcatcggctactcctataccatcccctgatctcaaaacttgtggtagagccaccatatcggatggtccactagtaccctatacttgttgcccccctcctatgccaactaactttgacaccattccatattacaagttcccttctatgactaaactccgtatccgtcccctgctccatgctgttgatgaggagtatattgctaagtataatttggccataagtcgaatgaaagatcttgataagacagaccc

SEQ ID NO: 1650 - DNA, 515 bp, Artificial
  Mutation introduced by TALE nuclease pair POT33_T02 within a POT33 allele
caagtgtgtgcaatagtagttctactactacaactctcaaaactcctttcatttcatccaatacttctttaggttccactcctaagcccctctcaacttttcctccatggaaaacgtaacaaaactttcaaagtctcttgcaaagtttctaatagtggtgaccaaaaccaaaacatgaaattctgttgatcgaagaaatgttcttcttggcttaggaggtctttatggtgttgctaatgctataccattagcagcatcggctactcctataccatcccctgatctcaaaacttgtggtagagccaccatatcggatggtccactagtaccctatacttgttgcccccctcctatgccaactaactttgacaccacttccattattcacaagttcccttcctatgactaaactccagtatccgtcccctgctccatgctgttgatgaggagtatattgctaagtataatttggccataagtcgaatgaaagatcttgataagacagaccctttaaa

SEQ ID NO: 1651 - DNA, 484 bp, Artificial
  Mutation introduced by TALE nuclease pair POT33_T02 within a POT33 allele
caagtgtgtgcaatagtagttctactactacaactctcaaaactcctttcatttcatccaatacttctttaggttccactcctaagcccctctcaacttttcctccatggaaaacgtaacaaaactttcaaagtctcttgcaaagtttctaatagtggtgaccaaaacaataatcgaaacattctgttgatcgaagaaatgttcttcttggcttaggaggtctttatggtgttgctaatgctataccattagcagcatcggctactcctataccatcccctgatctcaaaacttgtggtagagccaccatatcggatggtccactagtaccctatacttgttgcccccctcctcatgccaactaactttgtacaccacttccattattcacaagttcccattcctatgactaaactccagtactccgtcccctgctccatgctgttgatgatggagtatagttgctaagtataattttggccat

SEQ ID NO: 1652 - DNA, 512 bp, Artificial
  Mutation introduced by TALE nuclease pair POT33_T02 within a POT33 allele
caagtgttgcaatagtagttctactactacaactctcaaaactcctttcatttcatccaatacttctttaggttccactcctaagcccctctcaacttttcctccatggaaaacgtaacaaaactttcaaagtctcttgcaaagtttctaatagtggtgaccaaaaccaaaacgaattctgttgatcgaagaaatgttcttcttggcttaggaggtctttatggtgttgctaatgctataccattagcagcatcggctactcctataccatcccctgatctcaaaacttgtggtagagccaccatatcggatggtccactagtaccctatacttgttgcccccctcctatgccaactaactttgacaccattccatattacaagttcccttctatgactaaactccgtatccgtcccctgctcatgctgttgatgaggagtatattgctaagtataatttggccataagtcgaatgaaagatcttgataagacagaccctttaaaccctctt

SEQ ID NO: 1653 - DNA, 515 bp, Artificial
  Mutation introduced by TALE nuclease pair POT33_T02 within a POT33 allele
caagtgtgtgcaatagtagttctactactacaactctcaaaactcctttcatttcatccaatacttctttaggttccactcctaagcccctctcaacttttcctccatggaaaacgtaacaaaactttcaaagtctcttgcaaagtttctaatagtggtgaccaaaaccaatgaaacgaattctgttgatcgaagaaatgttcttcttggcttaggaggtctttatgtgttgctaatgctataccattagcagcatcggctactcctataccatcccctgatctcaaaacttgtggtagagccaccatatcggatggtccactagtaccctatacttgttgcccccctcctatgccaactaactttgacaccattccatattacaagttcccttctatgactaaactccgtatccgtcccctgctcatgctgttgatgaggagtatattgctaagtataatttggccataagtcgaatgaaagatcttgataagacagaccctttaaaccctctt

SEQ ID NO: 1654 - DNA, 512 bp, Artificial
  Mutation introduced by TALE nuclease pair POT33_T02 within a POT33 allele
  misc_feature (183); (184): n is a or c or t or g
caagtgtgtgcaatagtagttctactactacaactctcaaaactcctttcatttcatccaatacttctttaggttccactcctaagcccctctcaacttttcctccatggaaaacgtaacaaaactttcaaagtctcttgcaaagtttctaatagtggtgaccaaaaccaaaatcttgaattnntcgaagaaatgttcttcttggcttaggaggtctttatggtgttgctaatgctataccattagcagcatcggctactcctataccatcccctgatctcaaaacttgtggtagagccaccatatcggatggtccactagtaccctatacttgttgcccccctcctatgccaactaactttgacaccattccatattacaagttcccttctatgactaaactccgtatccgtcccctgctccatgctgttgatgaggagtatattgctaagtataatttggccataagtcgaatgaaagatcttgataagacagaccctttaaaccctctt

SEQ ID NO: 1655 - DNA, 471 bp, Artificial
  Mutation introduced by TALE nuclease pair POT33_T02 within a POT33 allele
caagtgtgtgcaatagtagttctactactacaactctcaaaactcctttcatttcatccaatacttctttaggttccactcctaagcccctttcaacttttcctccatggaaaacgtaacaaaactttcaaagtctcttgcaaagtttctaatagtggtgaccaaaaccaaaacgaattctgttgatcgaagaaatgttcttcttggcttaggaggtctttatggtgttgctaatgctataccattagcagcatcggctactcctataccatcccctgatctcaaaacttgtggtagagccaccatatcggatggtccactagtaccctatacttgttgcccccctcctcatgccaactaactttgtacaccacttccatattcacaagttcccttcctatgactaaactcagtactccgtcccctgctccatgctgttgatgatggagtatagttgctaagtataatttt

SEQ ID NO: 1656 - DNA, 517 bp, Artificial
  Mutation introduced by TALE nuclease pair POT33_T02 within a POT33 allele
caagtgtgtgcaatagtagttctactactacaactctcaaaactcctttcatttcatccaatacttctttaggttccactcctaagcccctctcaacttttcctccatggaaaacgtaacaaaactttcaaagtctcttgcaaagtttctaatagtggtgaccaaaaccaaacgaaacgaattctgttgatcgaagaaatgttcttcttggcttaggaggtctttatggtgttgctaatgctataccattagcagcatcggctactcctataccatcccctgatctcaaaacttgtggtagagccaccatatcggatggtccactagtaccctatacttgttgcccccctcctatgccaactaactttgacaccattccatattacaagttcccttctatgactaaactccgtatccgtcccctgctcatgctgttgatgaggagtatattgctaagtataatttggccataagtcgaatgaaagatcttgataagacagaccctttaaaccctctt

SEQ ID NO: 1657 - DNA, 500 bp, Artificial
  Mutation introduced by TALE nuclease pair POT33_T02 within a POT33 allele
caagtgtgtgcaatagtagttctactactacaactctcaaaactcctttcatttcatccaatacttctttaggttccactcctaagccctctcaacttttcctccatggaaaacgtaacaaaactttcaaagtctcttgcaaagtttctaatagtggtgaccaactagattgatcgaagaaatgttcttcttggcttaggaggtctttatggtgttgctaatgctataccattagcagcatcggctactcctataccatcccctgatctcaaaacttgtggtagagccaccatatcggatggtccactagtaccctatacttgttgcccccctcctatgccaactaactttgacaccattccatattacaagttcccttctatgactaaactccgtatccgtcccctgctcatgctgttgatgaggagtatattgctaagtataatttggccataagtcgaatgaaagatcttgataagacagaccctttaaaccctctt

SEQ ID NO: 1658 - DNA, 510 bp, Artificial
  Mutation introduced by TALE nuclease pair POT33_T02 within a POT33 allele
caagtgtgtgcaatagtagttctactactacaactctcaaaactcctttcatttcatccaatacttctttaggttccactcctaagcccctctcaacttttcctccatggaaaacgtaacaaaactttcaaagtctcttgcaaagtttctaatagtggtgaccaaaacaacgaattctgttgatcgaagaaatgttcttcttggcttaggaggtctttatggtgttgctaatgctataccattagcagcatcggctactcctataccatcccctgatctcaaaacttgtggtagagccaccatatcggatggtccactagtaccctatacttgttgcccccctcctatgccaactaactttgacaccattccatattacaagttcccttctatgactaaactccgtatccgtcccctgctcatgctgttgatgaggagtatattgctaagtataatttggccataagtcgaatgaaagatcttgataagacagaccctttaaaccctctt

SEQ ID NO: 1659 - DNA, 510 bp, Artificial
  Mutation introduced by TALE nuclease pair POT33_T02 within a POT33 allele
caagtgtgtgcaatagtagttctactactacaactctcaaaactcctttcatttcatccaatacttctttaggttccactcctaagccctctcaacttttcctccatggaaaacgtaacaaaactttcaaagtctcttgcaaagtttctaatagtggtgaccaaaaccaaaacattctgttgatcgaagaaatgttcttcttggcttaggaggtctttatggtgttgctaatgctataccattagcagcatcggctactcctataccatcccctgatctcaaaacttgtggtagagccaccatatcggatggtccactagtaccctatacttgttgcccccctcctatgccaactaactttgacaccattccatattacaagttcccttctatgactaaactccgtatccgtcccctgctcatgctgttgatgaggagtatattgctaagtataatttggccataagtcgaatgaaagatcttgataagacagaccctttaaaccctctt

SEQ ID NO: 1660 - DNA, 454 bp, Artificial
  Mutation introduced by TALE nuclease pair POT33_T02 within a POT33 allele
caagtgtgtgcaatagtagttctactactacaactctcaaaactcctttcatttcatccaatacttctttaggttccactcctaagcccctctcaacttttcctccatggaaaacgtaacaaaactttcaaagtctcttgcaaagtttctaatagtggtgaccaaaaccaaaacgaattctgttgatcgaagaaatgttcttcttggcttaggaggtctttatggtgttgctaatgctataccattagcagcatcggctactcctataccatcccctgatctcaaaacttgtggtagagccaccatatcggatggtccactagtaccctatacttgttgcccccctcctatgccaactaactttgtacaccacttccattattcacaagttcccattcctatgactaaactccagtactccgtcccctgctccatgctgttgatgaggagtata

SEQ ID NO: 1661 - DNA, 501 bp, Artificial
  Mutation introduced by TALE nuclease pair POT33_T02 within a POT33 allele
caagtgtgtgcaatagtagttctactactacaactctcaaaactcctttcatttcatccaatacttctttaggttccactcctaagcccctctcaacttttcctccatggaaaacgtaacaaaactttcaaagtctcttgcaaagtttctaatagtggtgaccaaaaccaaaacgaattctgttgatcgaagaaatgttcttcttggcttaggaggtctttatggtgttgctaatgctataccattagcagcatcggctactcctataccatcccctgatctcaaaacttgtggtagagccaccatatcggatggtccactagtaccctatacttgttgcccccctcctatgccaactaactttgacaccattccatattacaagttcccttctatgactaactccgtatccgtcccctgctcatgctgttgatgaggagtatattgctaagtataatttggccataagtcgatgaaagatcttgataagacagacccttt

SEQ ID NO: 1662 - DNA, 512 bp, Artificial
  Mutation introduced by TALE nuclease pair POT33_T02 within a POT33 allele
caagtgtgtgcaatagtagttctactactacaactctcaaaactcctttcatttcatccaatacttctttaggttccactcctaagccctctcaacttttcctccatggaaaacgtaacaaaactttcaaagtctcttgcaaagtttctaatagtggtgaccaaaaccaaaacgaattctgttgatcgaagaaatgttcttcttggcttaggaggtctttatggtgttgctaatgctataccattagcagcatcggctactcctataccatccactgatctcaaaacttgtggtagagccaccatatcggatggtccactagtaccctatacttgttgcccccctcctatgccaactaactttgacaccattccatattacaagttcccttctatgactaaactccgtatccgtcccctgctcatgctgttgatgaggagtatattgctaagtataatttggccataagtcgaatgaaagatcttgataagacagaccctttaaaccctctt

SEQ ID NO: 1663 - DNA, 481 bp, Artificial
  Mutation introduced by TALE nuclease pair POT33_T02 within a POT33 allele
caagtgtgtgcaatagtagttctactactacaactctcaaaactcctttcatttcatccaatacttctttaggttccactcctaagcccctctcaacttttcctccatggaaaacgtaacaaaactttcaaagtctcttgcaaagtttctaatagtggtgaccaaaaccaaaacgaattctgttgatcgaagaaatgttcttcttggcttaggaggtctttatggtgttgctaatgctataccattagcagcatcggctactcctataccatcccctgatctcaaaacttgtggtagagccaccatatcggatggtccactagtaccctatacttgttgcccccctcctcatgccaactaactttgtacaccacttccattattcacaagtttcccattcctatgactaaactccagtactccgtcccctgctccatgctgttgatgatggagtatagttgctaagtataattttggccat

SEQ ID NO: 1664 - DNA, 498 bp, Artificial
  Mutation introduced by TALE nuclease pair POT33_T02 within a POT33 allele
caagtgtgtgcaatagtagttctactactacaactctcaaaactcctttcatttcatccaatacttctttaggttccactcctaagcccctctcaacttttcctccatggaaaacgtaacaaaactttcaaagtctcttgcaaagtttctaatagtggtgaccatgattgatcgaagaaatgttcttcttggcttaggaggtctttatggtgttgctaatgctataccattagcagcatcggctactcctataccatcccctgatctcaaaacttgtggtagagccaccatatcggatggtccactagtaccctatacttgttgcccccctcctatgccaactaactttgacaccattccatattacaagttcccttctatgactaaactccgtatccgtcccctgctcatgctgttgatgaggagtatattgctaagtataatttggccataagtcgaatgaaagatcttgataagacagaccctttaaaccctctt

SEQ ID NO: 1665 - DNA, 432 bp, Artificial
  Mutation introduced by TALE nuclease pair POT33_T02 within a POT33 allele
caagtgtgtgcaatagtagttctactactacaactctcaaaactcctttcatttcatccaatacttctttaggttccactcctaagcccctctcaacttttcctccatggaaaacgtaacaaaactttcaaagtctcttgcaaagtttctaatagtggtgaccaattctgttgatcgaagaaatgttcttcttggcttaggaggtctttatggtgttgctaatgctataccattagcagcatcggctactcctataccatcccctgatctcaaaacttgtggtagagccaccatatcggatggtccactagtaccctatacttgttgcccccctcctatgccaactaactttgtacaccacttccatattcacaagttcccttcctatgactaaactccagtactccgtcccctgctccatgctgttgatga

SEQ ID NO: 1666 - DNA, 513 bp, Artificial
  Mutation introduced by TALE nuclease pair POT33_T02 within a POT33 allele
caagtgtgtgcaatagtagttctactactacaactctcaaaactcctttcatttcatccaatacttctttaggttccactcctaagccctctcaacttttcctccatggaaaacgtaacaaaactttcaaagtctcttgcaaagtttctaatagtggtgaccaaaaccaaactgaaattctgttgatcgaagaaatgttcttcttggcttaggaggtctttatggtgttgctaatgctataccattagcagcatcggctactcctataccatcccctgatctcaaaacttgtggtagagccaccatatcggatggtccactagtaccctatacttgttgcccccctcctatgccaactaactttgacaccattccatattacaagttcccttctatgactaaactccgtatccgtcccctgctcatgctgttgatgaggagtatattgctaagtataatttggccataagtcgaatgaaagatcttgataagacagaccctttaaaccctctt

SEQ ID NO: 1667 - DNA, 507 bp, Artificial
  Mutation introduced by TALE nuclease pair POT33_T02 within a POT33 allele
caagtgtgtgcaatagtagttctactactacaactctcaaaactcctttcatttcatccaatacttctttaggttccactcctaagcccctctcaacctttactccatggaaaacgtaacaaaactttcaaagtctcttgcaaagtttctaatagtggtgaccaaaaccaattctgttgatcgaagaaatgttcttcttggcttaggaggtctttatggtgttgctaatgctataccattagcagcatcggctactcctataccatcccctgatctcaaaacttgtggtagagccaccatatcggatggtccactagtaccctatacttgttgcccccctcctatgccaactaactttgacaccattccatattacaagttcccttctatgactaaactccgtatccgtcccctgctcatgctgttgatgaggagtatattgctaagtataatttggccataagtcgaatgaaagatcttgataagacagaccctttaaaccctctt

SEQ ID NO: 1668 - DNA, 511 bp, Artificial
  Mutation introduced by TALE nuclease pair POT33_T02 within a POT33 allele
  misc_feature (422): n is a or c or t or g
caagtgtgtgcaatagtagttctactactacaactctcaaaactcctttcatttcatccaatacttctttaggttccactcctaagcccctctcaacttttcctccatggaaaacgtaacaaaactttcaaagtctcttgcaaagtttctaatagtggtgaccaaaaccaaaacgaattctgttgatcgaagaatgttcttcttggcttaggaggtctttatggtgttgctaatgctataccattagcagcatcggctactcctataccatcactgatctcaaaacttgtggtagagccaccatatcggatggtccactagtaccctatacttgttgcccccctcctatgccaactaactttgacaccattccatattacaagttcccttctatgactaaactccgtatccgtcccctgctnatgctgttgatgaggagtatattgctaagtataatttggccataagtcgaatgaaagatcttgataagacagaccctttaaaccctctt

SEQ ID NO: 1669 - DNA, 494 bp, Artificial
  Mutation introduced by TALE nuclease pair POT33_T02 within a POT33 allele
caagtgtgtgcaatagtagttctactactacaactctcaaaactcctttcatttcatccaatacttctttaggttccactcctaagccctctcaacttttcctccatggaaaacgtaacaaaactttcaaagtctcttgcaaagtttctaatagtggtgaccaaaaccaaaagaaatgttcttcttggcttaggaggtctttatggtgttgctaatgctataccattagcagcatcggctactcctataccatcccctgatctcaaaacttgtggtagagccaccatatcggatggtccactagtaccctatacttgttgcccccctcctatgccaactaactttgacaccattccatattacaagttcccttctatgactaaactccgtatccgtcccctgctcatgctgttgatgaggagtatattgctaagtataatttggccataagtcgaatgaaagatcttgataagacagaccctttaaaccctctt

SEQ ID NO: 1670 - DNA, 514 bp, Artificial
  Mutation introduced by TALE nuclease pair POT33_T02 within a POT33 allele
  misc_feature (182): n is a or c or t or g
caagtgtgtgcaatagtagttctactactacaactctcaaaactcctttcatttcatccaatacttctttaggttccactcctaagcccctctcaacttttcctccatggaaaacgtaacaaaactttcaaagtctcttgcaaagtttctaatagtggtgaccaaaaccaaatcttgaattnatcgaagaaatgttcttcttggcttaggaggtctttatggtgttgctaatgctataccattagcagcatcggctactcctataccatcccctgatctcaaaacttgtggtagagccaccatatcggatggtccactagtaccctatacttgttgcccccctcctatgccaactaactttgtacaccacttccattattcacaagtttcccttcctatgactaaactccagtactccgtcccctgctccatgctgttgatgatggagtatagttgctaagtataattttggccataaagtcgaattgcaaagatcttgaataagactagaccc

SEQ ID NO: 1671 - DNA, 446 bp, Artificial
  Mutation introduced by TALE nuclease pair POT33_T02 within a POT33 allele
caagtgtgtgcaatagtagttctactactacaactctcaaaactcctttcatttcatccaatacttctttaggttccactcctaagccctctcaacttttcctccatggaaaacgtaacaaaactttcaaagtctcttgcaaagtttctaatagtggtgaccaaaaccaaaacaattctgttgatcgaagaaatgttcttcttggcttaggaggtctttatggtgttgctaatgctataccattagcagcatcggctactcctataccatcccctgatctcaaaacttgtggtagagccaccatatcggatggtccactagtaccctatacttgttgcccccctcctcatgccaactaactttgtacaccacttccattattcacaagttcccattccttatgactaaactccagtactccgtcccctgctccatgctgttgatga

SEQ ID NO: 1672 - DNA, 513 bp, Artificial
  Mutation introduced by TALE nuclease pair POT33_T02 within a POT33 allele
caagtgtgtgcaatagtagttctactactacaactctcaaaactcctttcatttcatccaatacttctttaggttccactcctaagcccctctcaacttttcctccatggaaaacgtaacaaaactttcaaagtctcttgcaaagtttctaatagtggtgaccaaaaccaaacgaattctgttgatcgaagaaatgttcttcttggcttaggaggtctttatggtgttgctaatgctataccattagcagcatcggctactcctataccatcccctgatctcaaaacttgtggtagagccaccatatcggatggtccactagtaccctatacttgttgcccccctcctatgccaactaactttgacaccattccatattacaagttcccttctatgactaaactccgtatccgtcccctgctccatgctgttgatgaggagtatattgctaagtataatttggccataagtcgaatgaaagatcttgataagacagaccctttaaaccctctt

SEQ ID NO: 1673 - DNA, 512 bp, Artificial
  Mutation introduced by TALE nuclease pair POT33_T02 within a POT33 allele
caagtgtgtgcaatagtagttctactactacaactctcaaaactcctttcatttcatccaatacttctttaggttccactcctaagcccctctcaacttttcctccatggaaaacgtaacaaaactttcaaagtctcttgcaaagtttctaatagtggtgaccaaaaccaaaacaattctgaattgatcgaagaaatgttcttcttggcttaggaggtctttatggtgttgctaatgctataccattagcagcatcggctactcctataccatcccctgatctcaaaacttgtggtagagccaccatatcggatggtccactagtaccctatacttgttgcccccctcctatgccaactaactttgacaccattccatattacaagttcccttctatgactaaactccgtatccgtcccctgctcatgctgttgatgaggagtatattgctaagtataatttggccataagtcgaatgaaagatcttgataagacagaccctttaaaccctc

SEQ ID NO: 1674 - DNA, 545 bp, Artificial
  Mutation introduced by TALE nuclease pair POT33_T02 within a POT33 allele
caagtgtgtgcaatagtagttctactactacaactctcaaaactcctttcatttcatccaatacttctttaggttccactcctaagcccctctcaacttttcctccatggaaaacgtaacaaaactttcaaagtctcttgcaaagtttctaatagtggtgaccaaacttgcccctgggcggctccaggaagcccgacggcgccaaacgaattctgttgatcgaagaaatgttcttcttggcttaggaggtctttatggtgttgctaatgctataccattagcagcatcggctactcctataccatcccctgatctcaaaacttgtggtagagccaccatatcggatggtccactagtaccctatacttgttgccccctcctatgccaactaactttgacaccattccatattacaagttcccttctatgactaaactccgtatccgtcccctgctcatgctgttgatgaggagtatattgctaagtataatttggccataagtcgaatgaaagatcttgataagacagaccctttaaaccctctt

SEQ ID NO: 1675 - DNA, 521 bp, Artificial
  Mutation introduced by TALE nuclease pair POT33_T02 within a POT33 allele
caagtgtgtgcaatagtagttctactactacaactctcaaaactcctttcatttcatccaatacttctttaggttccactcctaagccctctcaacttttcctccatggaaaacgtaacaaaactttcaaagtctcttgcaaagtttctaatagtggtgaccaaaaccaaaaacgaattctgttgatcgaagaaatgttcttcttggcttaggaggtctttatggtgttgctaatgctataccattagcagcatcggctactcctataccatcccctgatctcaaaacttgtggtagagccaccatatcggatggtccactagtaccctatacttgttgcccccctcctatgccaactaactttgtacaccacttccatattcacaagttcccttcctatgactaaactccagtactccgtcccctgctccatgctgttgatgatggagtatattgctaagtataatttggccataagtcgaatgaaagatcttgataagacagaccctttaaaccctctt

SEQ ID NO: 1676 - DNA, 480 bp, Artificial
  Mutation introduced by TALE nuclease pair POT33_T02 within a POT33 allele
caagtgtgtgcaatagtagttctactactacaactctcaaaactcctttcatttcatccaatacttctttaggttccactcctaagccctctcaacttttcctccatggaaaacgtaacaaaactttcaaagtctcttgcaaagtttctaatagtggtgaccaaaaccaaaacgaattctgttgatcgaagaaatgttcttcttggcttaggaggtctttatggtgttgctaatgctataccattagcagcatcggctactcctataccatcccctgatctcaaaacttgtggtagagccaccatatcggatggtccactagtaccctatacttgttgcccccctcctatgccaactaactttgacaccattccatattacaagttcccttctatgactaaactccgtatccgtcccctgctccatgctgttgatgaggagtatattgctaagtataatttggccataagtcgaatgaaa

SEQ ID NO: 1677 - DNA, 395 bp, Artificial
  Mutation introduced by TALE nuclease pair POT33_T02 within a POT33 allele
caagtgtgtgcaatagtagttctactactacaactctcaaaactcctttcatttcatccaatacttctttaggttccactcctaagccctctcaacttttcctccatggaaaacgtaacaaaactttcaaagtctcttgcaaagtttctaatagtggtgaccaaacttgccctgggcggctccaggaagcccgacggcgccaaacgaattctgttgatcgaagaatgttcttcttggcttaggaggtctttatggtgttgctaatgctataccattagcagcatcggctactcctataccatcccctgatctcaaaacttgtggtagagccaccatatcggatggtccactagtaccctatacttgttgccccctcctcatgcacatcacttgac

SEQ ID NO: 1678 - DNA, 493 bp, Artificial
  Mutation introduced by TALE nuclease pair POT33_T02 within a POT33 allele
caagtgtgtgcaatagtagttctactactacaactctcaaaactcctttcatttcatccaatacttctttaggttccactcctaagcccctctcaacttttcctccatggaaaacgtaacaaaactttcaaagtctcttgcaaagtttctaatagtggtgaccaaaaccacgaattctgttgatcgaagaaatgttcttcttggcttaggaggtctttatggtgttgctaatgctataccattagcagcatcggctactcctataccatcccctgatctcaaaacttgtggtagagccaccatatcggatggtccactagtaccctatacttgttgcccccctcctatgccaactaactttgacaccattccatattacaagttcccttctatgactaaactccgtatccgtcccctgctcatgctgttgatgaggagtatattgctaagtataatttggccataagtcgaatgaaagatcttgataagacag

SEQ ID NO: 1679 - DNA, 507 bp, Artificial
  Mutation introduced by TALE nuclease pair POT33_T02 within a POT33 allele
caagtgtgtgcaatagtagttctactactacaactctcaaaactcctttcatttcatccaatacttctttaggttccactcctaagcccctctcaacttttcctccatggaaaacgtaacaaaactttcaaagtctcttgcaaagtttctaatagtggtgaccaaacgaattctgttgatcgaagaaatgttcttcttggcttaggaggtctttatggtgttgctaatgctataccattagcagcatcggctactcctataccatcccctgatctcaaaacttgtggtagagccaccatatcggatggtccactagtaccctatacttgttgcccccctcctatgccaactaactttgacaccattccatattacaagttcccttctatgactaaactccgtatccgtcccctgctccatgctgttgatgaggagtatattgctaagtataatttggccataagtcgaatgaaagatcttgataagacagaccctttaaaccctctt

SEQ ID NO: 1680 - DNA, 522 bp, Artificial
  Mutation introduced by TALE nuclease pair POT33_T02 within a POT33 allele
caagtgtgtgcaatagtagttctactactacaactctcaaaactcctttcatttcatccaatacttctttaggttccactcctaagcccctctcaacttttcctccatggaaaacgtaacaaaactttcaaagtctcttgcaaagtttctaatagtggtgaccaaaaccaaaacgaattctgttgatcgaagaaatgttcttcttggcttaggaggtctttatggtgttgctaatgctataccattagcagcatcggctactcctataccatcccctgatctcaaaacttgtggtagagccaccatatcggatggtccactagtaccctatacttgttgcccccctcctatgccaactaactttgacaccattccatattacaagttcccttctatgactaaactccgtatccgtcccctgctccatgctgttgatgaggagtatattgctaagtataatttggccataagtcgaatgaaagatcttgataagacagaccctttaaaccctcttggctgaga

SEQ ID NO: 1681 - DNA, 511 bp, Artificial
  Mutation introduced by TALE nuclease pair POT33_T02 within a POT33 allele
caagtgtgtgcaatagtagttctactactacaactctcaaaactcctttcatttcatccaatacttctttaggttccactcctaagcccctctcaacttttcctccatggaaaacgtaacaaaactttcaaagtctcttgcaaagtttctaatagtggtgaccaaaaccaacgaattctgttgatcgaagaaatgttcttcttggcttaggaggtctttatggtgttgctaatgctataccattagcagcatcggctactcctataccatcccctgatctcaaaacttgtggtagagccaccatatcggatggtccactagtaccctatacttgttgcccccctcctatgccaactaactttgacaccattccatattacaagttcccttctatgactaaactccgtatccgtcccctgctcatgctgttgatgaggagtatattgctaagtataatttggccataagtcgaatgaaagatcttgataagacagaccctttaaaccctctt

SEQ ID NO: 1682 - DNA, 486 bp, Artificial
  Mutation introduced by TALE nuclease pair POT33_T02 within a POT33 allele
caagtgtgtgcaatagtagttctactactacaactctcaaaactcctttcatttcatccaatacttctttaggttccactcctaagcccctctcaacttttcctccatggaaaacgtaacaaaactttcaaagtctcttgcaaagtttctaatagtggtgaccaatgattgatcgaagaaatgttcttcttggcttaggaggtctttatggtgttgctaatgctataccattagcagcatcggctactcctataccatcccctgatctcaaaacttgtggtagagccaccatatcggatggtccactagtaccctatacttgttgcccccctcctatgccaactaactttgacaccattccatattacaagttcccttctatgactaaactccgtatccgtcccctgctcatgctgttgatgaggagtatattgctaagtataatttggccataagtcgaatgaaagatcttgataagacagaccc

SEQ ID NO: 1683 - DNA, 505 bp, Artificial
  Mutation introduced by TALE nuclease pair POT33_T02 within a POT33 allele
caagtgtgtgcaatagtagttctactactacaactctcaaaactcctttcatttcatccaatacttctttaggttccactcctaagcccctctcaacttttcctccatggaaaacgtaacaaaactttcaaagtctcttgcaaagtttctaatagtggtgaccaaaaccaactgttgatcgaagaaatgttcttcttggcttaggaggtctttatggtgttgctaatgctataccattagcagcatcggctactcctataccatcccctgatctcaaaacttgtggtagagccaccatatcggatggtccactagtaccctatacttgttgcccccctcctatgccaactaactttgacaccattccatattacaagttcccttctatgactaaactccgtatccgtcccctgctcatgctgttgatgaggagtatattgctaagtataatttggccataagtcgaatgaaagatcttgataagacagaccctttaaaccctctt

SEQ ID NO: 1684 - DNA, 514 bp, Artificial
  Mutation introduced by TALE nuclease pair POT33_T02 within a POT33 allele
caagtgtgtgcaatagtagttctactactacaactctcaaaactcctttcatttcatccaatacttctttaggttccactcctaagcccctctcaacttttcctccatggaaaacgtaacaaaactttcaaagtctcttgcaaagtttctaatagtggtgaccaaaaccaaaactgaattctgttgatcgaagaaatgttcttcttggcttaggaggtctttatggtgttgctaatgctataccattagcagcatcggctactcctataccatcccctgatctcaaaacttgtggtagagccaccatatcggatggtccactagtaccctatacttgttgcccccctcctatgccaactaactttgacaccattccatattacaagttcccttctatgactaaactccgtatccgtcccctgctcatgctgttgatgaggagtatattgctaagtataatttggccataagtcgaatgaaagatcttgataagacagaccctttaaaccctctt

SEQ ID NO: 1685 - DNA, 503 bp, Artificial
  Mutation introduced by TALE nuclease pair POT33_T02 within a POT33 allele
caagtgtgtgcaatagtagttctactactacaactctcaaaactcctttcatttcatccaatacttctttaggttccactcctaagccctctcaacttttcctccatggaaaacgtaacaaaactttcaaagtctcttgcaaagtttctaatagtggtgaccaaaaattctgttgatcgaagaaatgttcttcttggcttaggaggtctttatggtgttgctaatgctataccattagcagcatcggctactcctataccatcccctgatctcaaaacttgtggtagagccaccatatcggatggtccactagtaccctatacttgttgcccccctcctatgccaactaactttgacaccattccatattacaagttcccttctatgactaaactccgtatccgtcccctgctcatgctgttgatgaggagtatattgctaagtataatttggccataagtcgaatgaaagatcttgataagacagaccctttaaaccctctt

SEQ ID NO: 1686 - DNA, 508 bp, Artificial
  Mutation introduced by TALE nuclease pair POT33_T02 within a POT33 allele
caagtgtgtgcaatagtagttctactactacaactctcaaaactcctttcatttcatccaatacttctttaggttccactcctaagcccctctcaacttttcctccatggaaaacgtaacaaaactttcaaagtctcttgcaaagtttctaatagtggtgaccaaaaccaaaaacgaattctgttgatcgaagaaatgttcttcttggcttaggaggtctttatggtgttgctaatgctataccattagcagcatcggctactcctataccatcccctgatctcaaaacttgtggtagagccaccatatcggatggtccactagtaccctatacttgttgcccccctcctatgccaactaactttgacaccattccatattacaagttcccttctatgactaaactccgtatccgtcccctgctccatgctgttgatgaggagtatattgctaagtataatttggccataagtcgaatgaaagatcttgataagacagaccctttaaa

SEQ ID NO: 1687 - DNA, 516 bp, Artificial
  Mutation introduced by TALE nuclease pair POT33_T02 within a POT33 allele
caagtgtgtgcaatagtagttctactactacaactctcaaaactcctttcatttcatccaatacttctttaggttccactcctaagcccctctcaacttttcctccatggaaaacgtaacaaaactttcaaagtctcttgcaaagtttctaatagtggtgaccaaaaccaatgaaacgaattctgttgatcgaagaaatgttcttcttggcttaggaggtctttatggtgttgctaatgctataccattagcagcatcggctactcctataccatcccctgatctcaaaacttgtggtagagccaccatatcggatggtccactagtaccctatacttgttgcccccctcctatgccaactaactttgacaccattccatattacaagttcccttctatgactaaactccgtatccgtcccctgctcatgctgttgatgaggagtatattgctaagtataatttggccataagtcgaatgaaagatcttgataagacagaccctttaaaccctctt

SEQ ID NO: 1688 - DNA, 504 bp, Artificial
  Mutation introduced by TALE nuclease pair POT33_T02 within a POT33 allele
caagtgtgtgcaatagtagttctactactacaactctcaaaactcctttcatttcatccaatacttctttaggttccactcctaagcccctctcaacttttcctccatggaaaacgtaacaaaactttcaaagtctcttgcaaagtttctaatagtggtgaccaaaaattctgttgatcgaagaaatgttcttcttggcttaggaggtctttatggtgttgctaatgctataccattagcagcatcggctactcctataccatcccctgatctcaaaacttgtggtagagccaccatatcggatggtccactagtaccctatacttgttgcccccctcctatgccaactaactttgacaccattccatattacaagttcccttctatgactaaactccgtatccgtcccctgctcatgctgttgatgaggagtatattgctaagtataatttggccataagtcgaatgaaagatcttgataagacagaccctttaaaccctctt

SEQ ID NO: 1689 - DNA, 508 bp, Artificial
  Mutation introduced by TALE nuclease pair POT33_T02 within a POT33 allele
caagtgtgtgcaatagtagttctactactacaactctcaaaactcctttcatttcatccaatacttctttaggttccactcctaagccctctcaacttttcctccatggaaaacgtaacaaaactttcaaagtctcttgcaaagtttctaatagtggtgaccaaaaattctgttgatcgaagaaatgttcttcttggcttaggaggtctttatggtgttgctaatgctataccattagcagcatcggctactcctataccatcccctgatctcaaaacttgtggtagagccaccatatcggatggtccactagtaccctatacttgttgcccccctcctatgccaactaactttgacaccattccatattcacaagttcccttcttatgactaaactccagtatccgtcccctgctccatgctgttgatgaggagtatattgctaagtataattttggccataagtcgaatgaaagatcttgataagacagaccctttaaaccctctt

SEQ ID NO: 1690 - DNA, 471 bp, Artificial
  Mutation introduced by TALE nuclease pair POT33_T02 within a POT33 allele
caagtgtgtgcaatagtagttctactactacaactctcaaaactcctttcatttcatccaatacttctttaggttccactcctaagcccctctcaacttttcctccatggaaaacgtaacaaaactttcaaagtctcttgcaaagtttctaatagtggtgaccaaaaccaaaacacgaattctgttgatcgaagaaatgttcttcttggcttaggaggtctttatggtgttgctaatgctataccattagcagcatcggctactcctataccatcccctgatctcaaaacttgtggtagagccaccatatcggatggtccactagtaccctatacttgttgcccccctcctatgccaactaactttgtacaccattccatattcacaagtttcccttcctatgactaaactccagtatccgtcccctgctccatgctgttgatgaggagtatagttgctaagtataatttt

SEQ ID NO: 1691 - DNA, 515 bp, Artificial
  Mutation introduced by TALE nuclease pair POT33_T02 within a POT33 allele
caagtgtgtgcaatagtagttctactactacaactctcaaaactcctttcatttcatccaatacttctttaggttccactcctaagcccctctcaacttttcctccatggaaaacgtaacaaaactttcaaagtctcttgcaaagtttctaatagtggtgaccaaaacataatcgaacattctgttgatcgaagaaatgttcttcttggcttaggaggtctttatggtgttgctaatgctataccattagcagcatcggctactcctataccatcccctgatctcaaaacttgtggtagagccaccatatcggatggtccactagtaccctatacttgttgcccccctcctatgccaactaactttgacaccattccatattacaagttcccttctatgactaaactccgtatccgtcccctgctcatgctgttgatgaggagtatattgctaagtataatttggccataagtcgaatgaaagatcttgataagacagaccctttaaaccctctt

SEQ ID NO: 1692 - DNA, 433 bp, Artificial
  Mutation introduced by TALE nuclease pair POT33_T02 within a POT33 allele
caagtgtgtgcaatagtagttctactactacaactctcaaaactcctttcatttcatccaatacttctttaggttccactcctaagccctctcaacctttactccatggaaaacgtaacaaaactttcaaagtctcttgcaaagtttctaatagtggtgaccaaaaccaattctgttgatcgaagaaatgttcttcttggcttaggaggtctttatggtgttgctaatgctataccattagcagcatcggctactcctataccatcccctgatctcaaaacttgtggtagagccaccatatcggatggtccactagtaccctatacttgttgcccccctcctatgccaactaactttgacaccattccatattcacaagttcccttctatgactaaactccagtatccgtcccctgctccatgctgttgatga

SEQ ID NO: 1693 - DNA, 500 bp, Artificial
  Mutation introduced by TALE nuclease pair POT33_T02 within a POT33 allele
caagtgtgtgcaatagtagttctactactacaactctcaaaactcctttcatttcatccaatacttctttaggttccactcctaagccctctcaacttttcctccatggaaaacgtaacaaaactttcaaagtctcttgcaaagtttctaatagtggtgaccaaaaccgttgatcgaagaaatgttcttcttggcttaggaggtctttatggtgttgctaatgctataccattagcagcatcggctactcctataccatcccctgatctcaaaacttgtggtagagccaccatatcggatggtccactagtaccctatacttgttgcccccctcctatgccaactaactttgacaccattccatattacaagttcccttctatgactaaactccgtatccgtcccctgctcatgctgttgatgaggagtatattgctaagtataatttggccataagtcgaatgaaagatcttgataagacagaccctttaaaccctctt

SEQ ID NO: 1694 - DNA, 518 bp, Artificial
  Mutation introduced by TALE nuclease pair POT33_T02 within a POT33 allele
caagtgtgtgcaatagtagttctactactacaactctcaaaactcctttcatttcatccaatacttctttaggttccactcctaagcccctctcaacttttcctccatggaaaacgtaacaaaactttcaaagtctcttgcaaagtttctaatagtggtgaccaaaaccaacaatcgaaacattctgttgatcgaagaaatgttcttcttggcttaggaggtctttatggtgttgctaatgctataccattagcagcatcggctactcctataccatcccctgatctcaaaacttgtggtagagccaccatatcggatggtccactagtaccctatacttgttgcccccctcctatgccaactaactttgacaccattccatattacaagttcccttctatgactaaactccgtatccgtcccctgctcatgctgttgatgaggagtatattgctaagtataatttggccataagtcgaatgaaagatcttgataagacagaccctttaaaccctctt

SEQ ID NO: 1695 - DNA, 505 bp, Artificial
  Mutation introduced by TALE nuclease pair POT33_T02 within a POT33 allele
caagtgtgtgcaatagtagttctactactacaactctcaaaactcctttcatttcatccaatacttctttaggttccactcctaagcccctctcaacttttcctccatggaaaacgtaacaaaactttcaaagtctcttgcaaagtttctaatagtggtgaccaaattctgttgatcgaagaaatgttcttcttggcttaggaggtctttatggtgttgctaatgctataccattagcagcatcggctactcctataccatcccctgatctcaaaacttgtggtagagccaccatatcggatggtccactagtaccctatacttgttgcccccctcctatgccaactaactttgacaccattccatattcacaagttcccttctatgactaaactccagtatccgtcccctgctccatgctgttgatgaggagtatattgctaagtataatttggccataagtcgaatgaaagatcttgataagacagaccctttaaaccctctt

SEQ ID NO: 1696 - DNA, 509 bp, Artificial
  Mutation introduced by TALE nuclease pair POT33_T02 within a POT33 allele
caagtgtgtgcaatagtagttctactactacaactctcaaaactcctttcatttcatccaatacttctttaggttccactcctaagcccctctcaacttttcctccatggaaaacgtaacaaaactttcaaagtctcttgcaaagtttctaatagtggtgaccaaaaccaaaatttctgttgatcgaagaaatgttcttcttggcttaggaggtctttatggtgttgctaatgctataccattagcagcatcggctactcctataccatcccctgatctcaaaacttgtggtagagccaccatatcggatggtccactagtaccctatacttgttgcccccctcctatgccaactaactttgacaccattccatattacaagttcccttctatgctaaactccgtatccgtcccctgctcatgctgttgatgaggagtatattgctaagtataatttggccataagtcgaatgaaagatcttgataagacagaccctttaaaccctctt

SEQ ID NO: 1697 - DNA, 515 bp, Artificial
  Mutation introduced by TALE nuclease pair POT33_T02 within a POT33 allele
caagtgtgtgcaatagtagttctactactacaactctcaaaactcctttcatttcatccaatacttctttaggttccactcctaagccctctcaacttttcctccatggaaaacgtaacaaaactttcaaagtctcttgcaaagtttctaatagtggtgaccaaaaccaaaaacgaattctgttgatcgaagaaatgttcttcttggcttaggaggtctttatggtgttgctaatgctataccattagcagcatcggctactcctataccatcccctgatctcaaaacttgtggtagagccaccatatcggatggtccactagtaccctatacttgttgcccccctcctatgccaactaactttgacaccattccatattacaagttcccttctatgactaaactccagtatccgtcccctgctccatgctgttgatgaggagtatattgctaagtataatttggccataagtcgaatgaaagatcttgataagacagaccctttaaaccctctt

SEQ ID NO: 1698 - DNA, 507 bp, Artificial
  Mutation introduced by TALE nuclease pair POT33_T02 within a POT33 allele
caagtgtgtgcaatagtagttctactactacaactctcaaaactcctttcatttcatccaatacttctttaggttccactcctaagcccctctcaacttttcctccatggaaaacgtaacaaaactttcaaagtctcttgcaaagtttctaatagtggtgaccaaaacgaattctgttgatcgaagaaatgttcttcttggcttaggaggtctttatggtgttgctaatgctataccattagcagcatcggctactcctataccatcccctgatctcaaaacttgtggtagagccaccatatcggatggtccactagtaccctatacttgttgcccccctcctatgccaactaactttgacaccattccatattacaagttcccttctatgactaaactccgtatccgtcccctgctcatgctgttgatgaggagtatattgctaagtataatttggccataagtcgaatgaaagatcttgataagacagaccctttaaaccctctt

SEQ ID NO: 1699 - DNA, 513 bp, Artificial
  Mutation introduced by TALE nuclease pair POT33_T02 within a POT33 allele
caagtgtgtgcaatagtagttctactactacaactctcaaaactcctttcatttcatccaatacttctttaggttccactcctaagccctctcaacttttcctccatggaaaacgtaacaaaactttcaaagtctcttgcaaagtttctaatagtggtgaccaaaaccaaaaacgaattctgttgatcgaagaaatgttcttcttggcttaggaggtctttatggtgttgctaatgctataccattagcagcatcggctactcctataccatcccctgatctcaaaacttgtggtagagccactatatcggatggtccactagtaccctatacttgttgcccccctcctatgccaactaactttgacaccattccatattacaagttcccttctatgactaaactccgtatccgtcccctgctcatgctgttgatgaggagtatattgctaagtataatttggccataagtcgaatgaaagatcttgataagacagaccctttaaaccctctt

SEQ ID NO: 1700 - DNA, 521 bp, Artificial
  Mutation introduced by TALE nuclease pair POT33_T02 within a POT33 allele
caagtgtgtgcaatagtagttctactactacaactctcaaaactcctttcatttcatccaatacttctttaggttccactcctaagcccctctcaacttttcctccatggaaaacgtaacaaaactttcaaagtctcttgcaaagtttctaatagtggtgaccaaaaccaaaacaaattctgttgatcgaagaaatgttcttcttggcttaggaggtctttatggtgttgctaatgctataccattagcagcatcggctactcctataccatcccctgatctcaaaacttgtggtagagccaccatatcggatggtccactagtaccctatacttgttgcccccctcctatgccaactaactttgtacaccacttccattattcacaagttcccttcctatgactaaactccagtatccgtcccctgctccatgctgttgatgaggagtatattgctaagtataattttggccataagtcgaatgaaagatcttgataagacagaccctttaaaccctctt

SEQ ID NO: 1701 - DNA, 512 bp, Artificial
  Mutation introduced by TALE nuclease pair POT33_T02 within a POT33 allele
caagtgtgtgcaatagtagttctactactacaactctcaaaactcctttcatttcatccaatacttctttaggttccactcctaagcccctctcaacttttcctccatggaaaacgtaacaaaactttcaaagtctcttgcaaagtttctaatagtggtgaccaaaaccaaaacaattctgttgatcgaagaaatgttcttcttggcttaggaggtctttatggtgttgctaatgctataccattagcagcatcggctactcctataccatcccctgatctcaaaacttgtggtagagccaccatatcggatggtccactagtaccctatacttgttgcccccctcctatgccaactaactttgacaccattccatattacaagttcccttctatgactaaactccgtatccgtcccctgctcatgctgttgatgaggagtatattgctaagtataatttggccataagtcgaatgaaagatcttgataagacagaccctttaaaccctctt

SEQ ID NO: 1702 - DNA, 519 bp, Artificial
  Mutation introduced by TALE nuclease pair POT33_T02 within a POT33 allele
caagtgtgtgcaatagtagttctactactacaactctcaaaactcctttcatttcatccaatacttctttaggttccactcctaagcccctctcaacttttcctccatggaaaacgtaacaaaactttcaaagtctcttgcaaagtttctaatagtggtgaccaaaaccaaaacgaattctgttgatcgaagaaatgttcttcttggcttaggaggtctttatggtgttgctaatgctataccattagcagcatcggctactcctataccatcccctgatctcaaaacttgtggtagagccaccatatcggatggtccactagtaccctatacttgttgcccccctcctatgccaactaactttgtacaccattccatattcacaagttcccttccttatgactaaactccagtatccgtcccctgctccatgctgttgatgaggagtatattgctaagtataatttggccataagtcgaatgaaagatcttgataagacagaccctttaaaccctctt

SEQ ID NO: 1703 - DNA, 494 bp, Artificial
  Mutation introduced by TALE nuclease pair POT33_T02 within a POT33 allele
caagtgtgtgcaatagtagttctactactacaactctcaaaactcctttcatttcatccaatacttctttaggttccactcctaagcccctctcaacttttcctccatggaaaacgtaacaaaactttcaaagtctcttgcaaagtttctaatagtggtgaccaaaaccaacgaattctgttgatcgaagaaatgttcttcttggcttaggaggtctttatggtgttgctaatgctataccattagcagcatcggctactcctataccatcccctgatctcaaaacttgtggtagagccaccatatcggatggtccactagtaccctatacttgttgcccccctcctatgccaactaactttgacaccattccatattacaagttcccttctatgactaaactccgtatccgtcccctgctccatgctgttgatgaggagtatattgctaagtataatttggccataagtcgaatgaaagatcttgataagaca

SEQ ID NO: 1704 - DNA, 517 bp, Artificial
  Mutation introduced by TALE nuclease pair POT33_T02 within a POT33 allele
caagtgtgtgcaatagtagttctactactacaactctcaaaactcctttcatttcatccaatacttctttaggttccactcctaagcccctctcaacttttcctccatggaaaacgtaacaaaactttcaaagtctcttgcaaagtttctaatagtggtgaccaaaaccaaacacaacgaattctgttgatcgaagaaatgttcttcttggcttaggaggtctttatggtgttgctaatgctataccattagcagcatcggctactcctataccatcccctgatctcaaaacttgtggtagagccaccatatcggatggtccactagtaccctatacttgttgcccccctcctatgccaactaactttgacaccattccatattacaagttcccttctatgactaaactccgtatccgtcccctgctcatgctgttgatgaggagtatattgctaagtataatttggccataagtcgaatgaaagatcttgataagacagaccctttaaaccctctt

SEQ ID NO: 1705 - DNA, 508 bp, Artificial
  Mutation introduced by TALE nuclease pair POT33_T02 within a POT33 allele
caagtgtgtgcaatagtagttctactactacaactctcaaaactcctttcatttcatccaatacttctttaggttccactcctaagccctctcaacttttcctccatggaaaacgtaacaaaactttcaaagtctcttgcaaagtttctaatagtggtgaccaaaaccaaaaattctgttgatcgaagaaatgttcttcttggcttaggaggtctttatggtgttgctaatgctataccattagcagcatcggctactcctataccatcccctgatctcaaaacttgtggtagagccaccatatcggatggtccactagtaccctatacttgttgcccccctcctatgccaactaactttgacaccattccatattacaagttcccttctatgactaaactccgtatccgtcccctgctcatgctgttgatgaggagtatattgctaagtataatttggccataagtcgaatgaaagatcttgataagacagaccctttaaaccctct

SEQ ID NO: 1706 - DNA, 513 bp, Artificial
  Mutation introduced by TALE nuclease pair POT33_T02 within a POT33 allele
caagtgtgtgcaatagtagttctactactacaactctcaaaactcctttcatttcatccaatacttctttaggttccactcctaagcccctctcaacttttcctccatggaaaacgtaacaaaactttcaaagtctcttgcaaagtttctaatagtggtgaccaaaaccaaacgaattctgttgatcgaagaaatgttcttcttggcttaggaggtctttatggtgttgctaatgctataccattagcagcatcggctactcctataccatcccctgatctcaaaacttgtggtagagccaccatatcggatggtccactagtaccctatacttgttgcccccctcctatgccaactaactttgacaccattccatattacaagttcccttctatgactaaactccgtatccgccccctgctccatgctgttgatgaggagtatattgctaagtataatttggccataagtcgaatgaaagatcttgataagacagaccctttaaaccctctt

SEQ ID NO: 1707 - DNA, 465 bp, Artificial
  Mutation introduced by TALE nuclease pair POT33_T02 within a POT33 allele
caagtgtgtgcaatagtagttctactactacaactctcaaaactcctttcatttcatccaatacttctttaggttccactcctaagccctctcaacttttcctccatggaaaacgtaacaaaactttcaaagtctcttgcaaagtttctaatagtggtgaccaaaaccaaattctgttgatcgaagaaatgttcttcttggcttaggaggtctttatggtgttgctaatgctataccattagcagcatcggctactcctataccatcccctgatctcaaaacttgtggtagagccaccatatcggatggtccactagtaccctatacttgttgcccccctcctcatgccaactaactttgtacaccacttccattattcacaagtttcccatttccttatgactaaactccagtactccgtcccctgctccatgctgttgatgatggagtatagttgctaagtat

SEQ ID NO: 1708 - DNA, 521 bp, Artificial
  Mutation introduced by TALE nuclease pair POT33_T02 within a POT33 allele
caagtgtgtgcaatagtagttctactactacaactctcaaaactcctttcatttcatccaatacttctttaggttccactcctaagcccctctcaacttttcctccatggaaaacgtaacaaaactttcaaagtctcttgcaaagtttctaatagtggtgaccaaaaccaaaacaatcgaaaattctgttgatcgaagaaatgttcttcttggcttaggaggtctttatggtgttgctaatgctataccattagcagcatcggctactcctataccatcccctgatctcaaaacttgtggtagagccaccatatcggatggtccactagtaccctatacttgttgcccccctcctatgccaactaactttgacaccattccatattacaagttcccttctatgactaaactccgtactccgtcccctgctccatgctgttgatgaggagtatattgctaagtataatttggccataagtcgaatgaaagatcttgataagacagaccctttaaaccctctt

SEQ ID NO: 1709 - DNA, 472 bp, Artificial
  Mutation introduced by TALE nuclease pair POT33_T02 within a POT33 allele
caagtgtgtgcaatagtagttctactactacaactctcaaaactcctttcatttcatccaatacttctttaggttccactcctaagccctctcaacttttcctccatggaaaacgtaacaaaactttcaaagtctcttgcaaagtttctaatagtggtgaccaaaaccaaaacgaattctgttgatcgaagaaatgttcttcttggcttaggaggtctttatggtgttgctaatgctataccattagcagcatcggctactcctataccatcccctgatctcaaaacttgtggtagagccaccatatcggatggtccactagtaccctatacttgttgcccccctcctatgccaactaactttgacaccattccatattacaagttcccttctatgactaaactccgtatccgtcccctgctccatgctgttgatgaggagtatattgctaagtataatttggccataagtc

SEQ ID NO: 1710 - DNA, 453 bp, Artificial
  Mutation introduced by TALE nuclease pair POT33_T02 within a POT33 allele
caagtgtgtgcaatagtagttctactactacaactctcaaaactcctttcatttcatccaatacttctttaggttccactcctaagccctctcaacttttcctccatggaaaacgtaacaaaactttcaaagtctcttgcaaagtttctaatagtggtgaccaaaaccaaaaacgaattctgttgatcgaagaaatgttcttcttggcttaggaggtctttatggtgttgctaatgctataccattagcagcatcggctactcctataccatcccctgatctcaaaacttgtggtagagccaccatatcggatggtccactagtaccctatacttgttgcccccctcctcatgccaactaactttgtacaccacttccatattcacaagttcccttcctatgactaaactccagtactccgtcccctgctccatgctgttgatgaggagtata

SEQ ID NO: 1711 - DNA, 514 bp, Artificial
  Mutation introduced by TALE nuclease pair POT33_T02 within a POT33 allele
caagtgtgtgcaatagtagttctactactacaactctcaaaactcctttcatttcatccaatacttctttaggttccactcctaagccctctcaacttttcctccatggaaaacgtaacaaaactttcaaagtctcttgcaaagtttctaatagtggtgaccaaaaccaaatgaaacattctgttgatcgaagaaatgttcttcttggcttaggaggtctttatggtgttgctaatgctataccattagcagcatcggctactcctataccatcccctgatctcaaaacttgtggtagagccaccatatcggatggtccactagtaccctatacttgttgcccccctcctatgccaactaactttgacaccattccatattacaagttcccttctatgactaaactccgtatccgtcccctgctcatgctgttgatgaggagtatattgctaagtataatttggccataagtcgaatgaaagatcttgataagacagaccctttaaaccctctt

SEQ ID NO: 1712 - DNA, 478 bp, Artificial
  Mutation introduced by TALE nuclease pair POT33_T02 within a POT33 allele
caagtgtgtgcaatagtagttctactactacaactctcaaaactcctttcatttcatccaatacttctttaggttccactcctaagccctctcaacttttcctccatggaaaacgtaacaaaactttcaaagtctcttgcaaagtttctaatagtggtgaccaaaaccaaaacgaattctgttgatcgaagaaatgttcttcttggcttaggaggtctttatggtgttgctaatgctataccattagcagcatcggctactcctataccatcccctgatctcaaaacttgtggtagagccaccatatcggatggtccactagtaccctatacttgttgcccccctcctatgccaactaactttgacaccattccatattaacaagttcccttctaatgactaaaactccgtatccgtcccctgctcatgctgttgatgaggagtatattgctaaagtataaatttggccataaagtcg

SEQ ID NO: 1713 - DNA, 508 bp, Artificial
  Mutation introduced by TALE nuclease pair POT33_T02 within a POT33 allele
caagtgtgtgcaatagtagttctactactacaactctcaaaactcctttcatttcatccaatacttctttaggttccactcctaagcccctctcaacttttcctccatggaaaacgtaacaaaactttcaaagtctcttgcaaagtttctaatagtggtgaccaaaacgaattctgttgatcgaagaaatgttcttcttggcttaggaggtctttatggtgttgctaatgctataccattagcagcatcggctactcctataccatcccctgatctcaaaacttgtggtagagccaccatatcggatggtccactagtaccctatacttgttgcccccctcctatgccaactaactttgacaccattccatattacaagttcccttctatgactaaactccgtatccgtcccctgctccatgctgttgatgaggagtatattgctaagtataatttggccataagtcgaatgaaagatcttgataagacagaccctttaaaccctctt

SEQ ID NO: 1714 - DNA, 446 bp, Artificial
  Mutation introduced by TALE nuclease pair POT33_T02 within a POT33 allele
caagtgtgtgcaatagtagttctactactacaactctcaaaactcctttcatttcatccaatacttctttaggttccactcctaagcccctctcaacttttcctccatggaaaacgtaacaaaactttcaaagtctcttgcaaagtttctaatagtggtgaccaaaaccaaaacgaattctgttgatcgaagaaatgttcttcttggcttaggaggtctttatggtgttgctaatgctataccattagcagcatcggctactcctataccatcccctgatctcaaaacttgtggtagagccaccatatcggatggtccactagtaccctatacttgttgcccccctcctcatgccaactaactttgtacaccacttccatattcacaagttcccattcctatgactaaactccagtactccgtcccctgctccatgctgttgatga

SEQ ID NO: 1715 - DNA, 452 bp, Artificial
  Mutation introduced by TALE nuclease pair POT33_T02 within a POT33 allele
caaggtgtgtgcaatagtagttctactactacaactctcaaaactcctttcatttcatccaatacttctttaggttccactcctaagcccctctcaacttttcctccatggaaaacgtaacaaaactttcaaagtctcttgcaaagtttctaatagtggtgaccaaaaccaaaacgaattctgttgatcgaagaaatgttcttcttggcttaggaggtctttatggtgttgctaatgctataccattagcagcatcggctactcctataccatcccctgatctcaaaacttgtggtagagccaccatatcggatggtccactagtaccctatacttgttgcccccctcctatgccaactaactttgtacaccattccatattcacaagttcccttccttatgactaaactccagtatccgtcccctgctccatgctgttgatgaggagtata

SEQ ID NO: 1716 - DNA, 457 bp, Artificial
  Mutation introduced by TALE nuclease pair POT33_T02 within a POT33 allele
caagtgtgtgcaatagtagttctactactacaactctcaaaactcctttcatttcatccaatacttctttaggttccactcctaagcccctctcaacttttcctccatggaaaacgtaacaaaactttcaaagtctcttgcaaagtttctaatagtggtgaccaaaaccaaaatcatgaacattgattcgaagaaatgttcttcttggcttaggaggtctttatggtgttgctaatgctataccattagcagcatcggctactcctataccatcccctgatctcaaaacttgtggtagagccaccatatcggatggtccactagtaccctatacttgttgcccccctcctatgccaactaactttgacaccattccatattacaagttcccttctatgactaaactccgtatccgtcccctgctcatgctgttgatgaggagtatattgctaagtat

SEQ ID NO: 1717 - DNA, 520 bp, Artificial
  Mutation introduced by TALE nuclease pair POT33_T02 within a POT33 allele
caagtgtgtgcaatagtagttctactactacaactctcaaaactcctttcatttcatccaatacttctttaggttccactcctaagcccctctcaacttttcctccatggaaaacgtaacaaaactttcaaagtctcttgcaaagtttctaatagtggtgaccaaaaccaaaaacgaattctgttgatcgaagaaatgttcttcttggcttaggaggtctttatggtgttgctaatgctataccattagcagcatcggctactcctataccatcccctgatctcaaaacttgtggtagagccaccatatcggatggtccactagtaccctatacttgttgcccccctcctatgccaactaactttgtacaccattccattattcacaagttcccttcctatgactaaactccagtatccgtcccctgctccatgctgttgatgaggagtatattgctaagtataatttggccataagtcgaatgaaagatcttgataagacagaccctttaaaccctctt

SEQ ID NO: 1718 - DNA, 506 bp, Artificial
  Mutation introduced by TALE nuclease pair POT33_T02 within a POT33 allele
caagtgtgtgcaatagtagttctactactacaactctcaaaactcctttcatttcatccaatacttctttaggttccactcctaagccctctcaacttttcctccatggaaaacgtaacaaaactttcaaagtctcttgcaaagtttctaatagtggtgaccaaaaccaaaacgaattctgttgatcgaagaaatgttcttcttggcttaggaggtctttatggtgttgctaatgctataccattagcagcatcggctactcctataccatccactgatctcaaaacttgtggtagagccaccatatcggatggtccactagtaccctatacttgttgcccccctcctatgccaactaactttgacaccattccatattacaagttcccttcctatgactaaactccgtatcccgtcccctgctcatgctgttgatgaggcagtatattgtaagtataatttggccataagtcgaatgaaagatcttgataagacagacccttaaa

SEQ ID NO: 1719 - DNA, 512 bp, Artificial
  Mutation introduced by TALE nuclease pair POT33_T02 within a POT33 allele
caagtgtgtgcaatagtagttctactactacaactctcaaaactcctttcatttcatccaatacttctttaggttccactcctaagcccctctcaacttttcctccatggaaaacgtaacaaaactttcaaagtctcttgcaaagtttctaatagtggtgaccaaaaccaaaacattctgattgatcgaagaaatgttcttcttggcttaggaggtctttatggtgttgctaatgctataccattagcagcatcggctactcctataccatcccctgatctcaaaacttgtggtagagccaccatatcggatggtccactagtaccctatacttgttgcccccctcctatgccaactaactttgacaccattccatattacaagttcccttctatgactaaactccgtatccgtcccctgctcatgctgttgatgaggagtatattgctaagtataatttggccataagtcgaatgaaagatcttgataagacagaccctttaaaccctctt

SEQ ID NO: 1720 - DNA, 516 bp, Artificial
  Mutation introduced by TALE nuclease pair POT33_T02 within a POT33 allele
caagtgtgtgcaatagtagttctactactacaactctcaaaactcctttcatttcatccaatacttctttaggttccactcctaagcccctctcaacttttcctccatggaaaacgtaacaaaactttcaaagtctcttgcaaagtttctaatagtggtgaccaaaaccaaaacaaacgaattctgttgatcgaagaaatgttcttcttggcttaggaggtctttatggtgttgctaatgctataccattagcagcatcggctactcctataccatcccctgatctcaaaacttgtggtagagccaccatatcggatggtccactagtaccctatacttgttgcccccctcctatgccaactaactttgacaccattccatattacaagttcccttctatgactaaactccgtatccgtcccctgctcatgctgttgatgaggagtatattgctaagtataatttggccataagtcgaatgaaagatcttgataagacagaccctttaaaccctct

SEQ ID NO: 1721 - DNA, 545 bp, Artificial
  Mutation introduced by TALE nuclease pair POT33_T02 within a POT33 allele
caagtgtgtgcaatagtagttctactactacaactctcaaaactcctttcatttcatccaatacttctttaggttccactcctaagccctctcaacttttcctccatggaaaacgtaacaaaactttcaaagtctcttgcaaagtttctaatagtggtgaccaaacttgcccctgggcggctccaggaagcccgacggcgccaaacgaattctgttgatcgaagaaatgttcttcttggcttaggaggtctttatggtgttgctaatgctataccattagcagcatcggctactcctataccatcccctgatctcaaaacttgtggtagagccaccatatcggatggtccactagtaccctatacttgttgccccctcctatgccaactaactttgacaccattccatattacaagttccctttctatgactaaactccgtatccgtcccctgctcatgctgttgatgaggagtatattgctaagtataatttggccataagtcgaatgaaagatcttgataagacagaccctttaaaccctctt

SEQ ID NO: 1722 - DNA, 514 bp, Artificial
  Mutation introduced by TALE nuclease pair POT33_T02 within a POT33 allele
caaggtgtgtgcaatagtagttctactactacaactctcaaaactcctttcatttcatccaatacttctttaggttccactcctaagcccctctcaacttttcctccatggaaaacgtaacaaaactttcaaagtctcttgcaaagtttctaatagtggtgaccaaaaccaaaacgaattctgttgatcgaagaaatgttcttcttggcttaggaggtctttatggtgttgctaatgctataccattagcagcatcggctactcctataccatcccctgatctcaaaacttgtggtagagccaccatatcggatggtccactagtaccctatacttgttgcccccctcctatgccaactaactttgacaccattccatattacaagttcccttctatgactaaactccgtatccgtcccctgctcatgctgttgatgaggagtatattgctaagtataatttggccataagtcgaatgaaagatcttgataagacagaccctttaaaccctctt

SEQ ID NO: 1723 - DNA, 473 bp, Artificial
  Mutation introduced by TALE nuclease pair POT33_T02 within a POT33 allele
caagtgtgtgcaatagtagttctactactacaactctcaaaactcctttcatttcatccaatacttctttaggttccactcctaagcccctctcaacttttcctccatggaaaacgtaacaaaactttcaaagtctcttgcaaagtttctaatagtggtgaccaaaaccaaaacgaattctgttgatcgaagaaatgttcttcttggcttaggaggtctttatggtgttgctaatgctataccattagcagcatcggctactcctataccatcccctgatctcaaaacttgtggtagagccaccatatcggatggtccactagtaccctatacttgttgcccccctcctatgccaactaactttgtacaccacttccattattcacaagttcccattcctatgactaaactccagtactccgtcccctgctccatgctgttgatgatggagtatagttgctaagtataatttt

SEQ ID NO: 1724 - DNA, 447 bp, Artificial
  Mutation introduced by TALE nuclease pair POT33_T02 within a POT33 allele
caagtgtgtgcaatagtagttctactactacaactctcaaaactcctttcatttcatccaatacttctttaggttccactcctaagcccctctcaacttttcctccatggaaaacgtaacaaaactttcaaagtctcttgcaaagtttctaatagtggtgaccaaaaccaaaacgaattctgttgatcgaagaaatgttcttcttggcttaggaggtctttatggtgttgctaatgctataccattagcagcatcggctactcctataccatcccctgatctcaaaacttgtggtagagccaccatatcggatggtccactagtaccctatacttgttgcccccctcctatgccaactaactttgtacaccacttccattattcacaagtttcccttcctatgactaaactccagtactccgtcccctgcctccatgctgttgatga

SEQ ID NO: 1725 - DNA, 515 bp, Artificial
  Mutation introduced by TALE nuclease pair POT33_T02 within a POT33 allele
caagtgtgtgcaatagtagttctactactacaactctcaaaactcctttcatttcatccaatacttctttaggttccactcctaagcccctctcaacttttcctccatggaaaacgtaacaaaactttcaaagtctcttgcaaagtttctaatagtggtgaccaaaaccaaacaacgaattctgttgatcgaagaaatgttcttcttggcttaggaggtctttatggtgttgctaatgctataccattagcagcatcggctactcctataccatcccctgatctcaaaacttgtggtagagccaccatatcggatggtccactagtaccctatacttgttgcccccctcctatgccaactaactttgacaccattccatattacaagttcccttctatgactaaactccgtatccgtcccctgctcatgctgttgatgaggagtatattgctaagtataatttggccataagtcgaatgaaagatcttgataagacagaccctttaaaccctctt

SEQ ID NO: 1726 - DNA, 508 bp, Artificial
  Mutation introduced by TALE nuclease pair POT33_T02 within a POT33 allele
caagtgtgtgcaataagtagttctactactacaactctcaaaactcctttcatttcatccaatacttctttaggttccactcctaagcccctctcaacttttcctccatggaaaacgtaacaaaactttcaaagtctcttgcaaagtttctaatagtggtgaccaaacgaattctgttgatcgaagaaatgttcttcttggcttaggaggtctttatggtgttgctaatgctataccattagcagcatcggctactcctataccatcccctgatctcaaaacttgtggtagagccaccatatcggatggtccactagtaccctatacttgttgcccccctcctatgccaactaactttgacaccattccatattacaagttcccttctatgactaaactccgtatccgtcccctgctccatgctgttgatgaggagtatattgctaagtataatttggccataagtcgaatgaaagatcttgataagacagaccctttaaaccctctt

SEQ ID NO: 1727 - DNA, 505 bp, Artificial
  Mutation introduced by TALE nuclease pair POT33_T02 within a POT33 allele
caagtgtgtgcaatagtagttctactactacaactctcaaaactcctttcatttcatccaatacttctttaggttccactcctaagcccctctcaacttttcctccatggaaaacgtaacaaaactttcaaagtctcttgcaaagtttctaatagtggtgaccaaaaccaaaatttgatcgaagaaatgttcttcttggcttaggaggtctttatggtgttgctaatgctataccattagcagcatcggctactcctataccatcccctgatctcaaaacttgtggtagagccaccatatcggatggtccactagtaccctatacttgttgcccccctcctatgccaactaactttgacaccattccatattacaagttcccttctatgactaaactccgtatccgtcccctgctcatgctgttgatgaggagtatattgctaagtataatttggccataagtcgaatgaaagatcttgataagacagaccctttaaaccctctt

SEQ ID NO: 1728 - DNA, 521 bp, Artificial
  Mutation introduced by TALE nuclease pair POT33_T02 within a POT33 allele
caagtgtgtgcaatagtagttctactactacaactctcaaaactcctttcatttcatccaatacttctttaggttccactcctaagcccctctcaacttttcctccatggaaaacgtaaaacaatcattcaagtctcattgctaaagttctatggtggctaaaccaaaaccaaatctgaaacgaattctgttgatcgaagaaatgttcttcttggcttaggaggtctttatggtgttgctaatgctataccattagcagcatcggctactcctataccatcccctgatctcaaaacttgtggtagagccaccatatcggatggtccactagtaccctatacttgttgcccccctcctatgccaactaactttgacaccattccatattacaagttcccttctatgactaaactccgtatccgtcccctgctcatgctgttgatgaggagtatattgctaagtataatttggccataagtcgaatgaaagatcttgataagacagaccctttaaaccctctt

SEQ ID NO: 1729 - DNA, 514 bp, Artificial
  Mutation introduced by TALE nuclease pair POT33_T02 within a POT33 allele
caagtgtgtgcaatagtagttctactactacaactctcaaaactcctttcatttcatccaatacttctttaggttccactcctaagcccctctcaacttttcctccatggaaaacgtaacaaaactttcaaagtctcttgcaaagtttctaatagtggtgaccaaaaccaaaaacgaattctgttgatcgaagaaatgttcttcttggcttaggaggtctttatggtgttgctaatgctataccattagcagcatcggctactcctataccatcccctgatctcaaaacttgtggtagagccactatatcggatggtccactagtaccctatacttgttgcccccctcctatgccaactaactttgacaccattccatattacaagttcccttctatgactaaactccgtatccgtcccctgctcatgctgttgatgaggagtatattgctaagtataatttggccataagtcgaatgaaagatcttgataagacagaccctttaaaccctctt

SEQ ID NO: 1730 - DNA, 509 bp, Artificial
  Mutation introduced by TALE nuclease pair POT33_T02 within a POT33 allele
caagtgtgtgcaatagtagttctactactacaactctcaaaactcctttcatttcatccaatacttctttaggttccactcctaagcccctctcaacttttcctccatggaaaacgtaacaaaactttcaaagtctcttgcaaagtttctaatagtggtgaccaaaaacgaattctgttgatcgaagaaatgttcttcttggcttaggaggtctttatggtgttgctaatgctataccattagcagcatcggctactcctataccatcccctgatctcaaaacttgtggtagagccaccatatcggatggtccactagtaccctatacttgttgcccccctcctatgccaactaactttgacaccattccatattacaagttcccttctatgactaaactccgtatccgtcccctgctccatgctgttgatgaggagtatattgctaagtataatttggccataagtcgaatgaaagatcttgataagacagaccctttaaaccctctt

SEQ ID NO: 1731 - DNA, 472 bp, Artificial
  Mutation introduced by TALE nuclease pair POT33_T02 within a POT33 allele
caagtgtgtgcaatagtagttctactactacaactctcaaaactcctttcatttcatccaatacttctttaggttccactcctaagcccctctcaacttttcctccatggaaaacgtaacaaaactttcaaagtctcttgcaaagtttctaatagtggtgaccaaaaccaacgaattctgttgatcgaagaaatgttcttcttggcttaggaggtctttatggtgttgctaatgctataccattagcagcatcggctactcctataccatcccctgatctcaaaacttgtggtagagccaccatatcggatggtccactagtaccctatacttgttgcccccctcctcatgccaactaactttgtacaccacttccattattcacaagtttcccttcctatgactaaactccagtactccgtcccctgctccatgctgttgatgatggagtatagttgctaagtataatttt

SEQ ID NO: 1732 - DNA, 481 bp, Artificial
  Mutation introduced by TALE nuclease pair POT33_T02 within a POT33 allele
caagtgtgtgcaatagtagttctactactacaactctcaaaactcctttcatttcatccaatacttctttaggttccactcctaagccctctcaacttttcctccatggaaaacgtaacaaaactttcaaagtctcttgcaaagtttctaatagtggtgaccaaaaccgaaacgaattctgttgatcgaagaaatgttcttcttggcttaggaggtctttatggtgttgctaatgctataccattagcagcatcggctactcctataccatcccctgatctcaaaacttgtggtagagccaccatatcggatggtccactagtaccctatacttgttgcccccctcctcatgccgactaactttagtacaccacttccatattcatcaagtttcccttccttatgactaaactccagtactccgtcccctgctccatgctgttgatgatggagtatagttgctaagtataattttggccat

SEQ ID NO: 1733 - DNA, 467 bp, Artificial
  Mutation introduced by TALE nuclease pair POT33_T02 within a POT33 allele
  misc_feature (374): n is a or c or t or g
caagtgtgtgcaatagtagttctactactacaactctcaaaactcctttcatttcatccaatacttctttaggttccactcctaagcccctctcaacttttcctccatggaaaacgtaacaaaactttcaaagtctcttgcaaagtttctaatagtggtgaccaaaaccactgttgatcgaagaaatgttcttcttggcttaggaggtctttatggtgttgctaatgctataccattagcagcatcggctactcctataccatcccctgatctcaaaacttgtggtagagccaccatatcggatggtccactagtaccctatacttgttgcccccctcctatgccaactaactttgtacaccattccatattanaagttcccttcctatgactaaactccgtatccgtcccctgctccatgctgttgatgaggagtatattgctaagtataatttggccataagtcg

SEQ ID NO: 1734 - DNA, 508 bp, Artificial
  Mutation introduced by TALE nuclease pair POT33_T02 within a POT33 allele
caagtgtgtgcaatagtagttctactactacaactctcaaaactcctttcatttcatccaatacttctttaggttccactcctaagccctctcaacctttactccatggaaaacgtaacaaaactttcaaagtctcttgcaaagtttctaatagtggtgaccaaaaccaattctgttgatcgaagaaatgttcttcttggcttaggaggtctttatggtgttgctaatgctataccattagcagcatcggctactcctataccatcccctgatctcaaaacttgtggtagagccaccatatcggatggtccactagtaccctatacttgttgcccccctcctatgccaactaactttgtacaccattccatattacaagttcccttctatgactaaactccgtatccgtcccctgctccatgctgttgatgaggagtatattgctaagtataatttggccataagtcgaatgaaagatcttgataagacagaccctttaaaccctctt

SEQ ID NO: 1735 - DNA, 505 bp, Artificial
  Mutation introduced by TALE nuclease pair POT33_T02 within a POT33 allele
caagtgtgtgcaatagtagttctactactacaactctcaaaactcctttcatttcatccaatacttctttaggttccactcctaagcccctctcaacttttcctccatggaaaacgtaacaaaactttcaaagtctcttgcaaagtttctaatagtggtgaccaaaaccaaaacatgaattctgttgatcgaagaaatgttcttcttggcttaggaggtctttatggtgttgctaatgctataccattagcagcatcggctactcctataccatcccctgatctcaaaacttgtggtagagccaccatatcggatggtccactagtaccctatacttgttgcccccctcctatgccaactaactttgacaccattccatattacaagttcccttctatgactaaactccgtatccgtcccctgctcatgctgttgatgaggagtatattgctaagtataatttggccataagtcgaatgaaagatcttgataagacagacccttt

SEQ ID NO: 1736 - DNA, 508 bp, Artificial
  Mutation introduced by TALE nuclease pair POT33_T02 within a POT33 allele
caagtgtgtgcaatagtagttctactactacaactctcaaaactcctttcatttcatccaatacttctttaggttccactcctaagccctctcaacttttcctccatggaaaacgtaacaaaactttcaaagtctcttgcaaagtttctaatagtggtgaccaaaaccaaaattctgttgatcgaagaaatgttcttcttggcttaggaggtctttatggtgttgctaatgctataccattagcagcatcggctactcctataccatcccctgatctcaaaacttgtggtagagccaccatatcggatggtccactagtaccctatacttgttgcccccctcctatgccaactaactttgacaccattccatattacaagttcccttctatgactaaactccgtatccgtcccctgctcatgctgttgatgaggagtatattgctaagtataatttggccataagtcgaatgaaagatcttgataagacagaccctttaaaccctctt

SEQ ID NO: 1737 - DNA, 463 bp, Artificial
  Mutation introduced by TALE nuclease pair POT33_T02 within a POT33 allele
caagtgtgtgcaatagtagttctactactacaactctcaaaactcctttcatttcatccaatacttctttaggttccactcctaagcccctctcaacttttcctccatggaaaacgtaacaaaactttcaaagtctcttgcaaagtttctaatagtggagaaatgttcttcttggcttaggaggtctttatggtgttgctaatgctataccattagcagcatcggctactcctataccatcccctgatctcaaaacttgtggtagagccaccatatcggatggtccactagtaccctatacttgttgcccccctcctatgccaactaactttgacaccattccatattacaagttcccttctatgactaaactccgtaccgtccccctgctcatgctgttgatgaggagtatattgctaagtataattttggccataagtcgaatgaaagatcttgataagac

SEQ ID NO: 1738 - DNA, 507 bp, Artificial
  Mutation introduced by TALE nuclease pair POT33_T02 within a POT33 allele
caagtgtgtgcaatagtagttctactactacaactctcaaaactcctttcatttcatccaatacttctttaggttccactcctaagcccctctcaacttttactccatggaaaacgtaacaaaactttcaaagtctcttgcaaagtttctaatagtggtgaccaaaaccaattctgttgatcgaagaaatgttcttcttggcttaggaggtctttatggtgttgctaatgctataccattagcagcatcggctactcctataccatcccctgatctcaaaacttgtggtagagccaccatatcggatggtccactagtaccctatacttgttgcccccctcctatgccaactaactttgacaccattccatattacaagttcccttctatgactaaactccgtatccgtcccctgctcatgctgttgatgaggagtatattgctaagtataatttggccataagtcgaatgaaagatcttgataagacagaccctttaaaccctctt

SEQ ID NO: 1739 - DNA, 472 bp, Artificial
  Mutation introduced by TALE nuclease pair POT33_T02 within a POT33 allele
caagtgtgtgcaatagtagttctactactacaactctcaaaactcctttcatttcatccaatacttctttaggttccactcctaagccctctcaacttttcctccatggaaaacgtaacaaaactttcaaagtctcttgcaaagtttctaatagtggtgaccaaaacaacgaattctgttgatcgaagaaatgttcttcttggcttaggaggtctttatggtgttgctaatgctataccattagcagcatcggctactcctataccatcccctgatctcaaaacttgtggtagagccaccatatcggatggtccactagtaccctatacttgttgcccccctcctcatgccaactaactttagtacaccacttccattattcacaagtttcccattcctatgactaaactccagtactccgtcccctgctccatgctgttgatgatggagtatagttgctaagtataatttt

SEQ ID NO: 1740 - DNA, 513 bp, Artificial
  Mutation introduced by TALE nuclease pair POT33_T02 within a POT33 allele
caagtgtgtgcaatagtagttctactactacaactctcaaaactcctttcatttcatccaatacttctttaggttccactcctaagcccctctcaacttttcctccatggaaaacgtaacaaaactttcaaagtctcttgcaaagtttctaatagtggtgaccaaaaccaaaacaattctgttgatcgaagaaatgttcttcttggcttaggaggtctttatggtgttgctaatgctataccattagcagcatcggctactcctataccatcccctgatctcaaaacttgtggtagagccaccatatcggatggtccactagtaccctatacttgttgcccccctcctatgccaactaactttgacaccattccatattacaagttcccttctatgactaaactccgtatccgtcccctgctccatgctgttgatgaggagtatattgctaagtataatttggccataagtcgaatgaaagatcttgataagacagaccctttaaaccctctt

SEQ ID NO: 1741 - DNA, 488 bp, Artificial
  Mutation introduced by TALE nuclease pair POT33_T02 within a POT33 allele
  misc_feature (192); (277): n is a or c or t or g
caagtgtgtgcaatagtagttctactactacaactctcaaaactcctttcatttcatccaatacttctttaggttccactcctaagcccctctcaacttttcctccatggaaaacgtaacaaaactttcaaagtctcttgcaaagtttctaatagtggagaaaatgtttcttcttggcttaggaggtctttntggtgttgctaatgctataccattagcagcatcggctactcctataccatcccctgatctcaaaacttgtggtagagccaccatntcggatggtccactagtaccctatacttgttgccccccctcctatgccaactaactttgacaccattccatattacaagttcccttctatgactaaactccgtatccgtccccctgctcatgctgttgatgaggagtatattgctaagtataattttggccataagtcgaatgaaagatcttgataagacagaccctttaaaccctcttgg

SEQ ID NO: 1742 - DNA, 511 bp, Artificial
  Mutation introduced by TALE nuclease pair POT33_T02 within a POT33 allele
caagtgtgtgcaatagtagttctactactacaactctcaaaactcctttcatttcatccaatacttctttaggttccactcctaagcccctctcaacttttcctccatggaaaacgtaacaaaactttcaaagtctcttgcaaagtttctaatagtggtgaccaaaaccaacgaattctgttgatcgaagaaatgttcttcttggcttaggaggtctttatggtgttgctaatgctataccattagcagcatcggctactcctataccatcccctgatctcaaaacttgtggtagagccaccatatcggatggtccactagtaccctatacttgttgcccccctcctatgccaactaactttgacaccattccatattacaagttcccttctatgactaaactccgtatccgtcccctgctcatgctgttgatgaggagtatattgctaagtataatttggccataagtcgaatgaaagatcttgataagacagcacctttaaaccctctt

SEQ ID NO: 1743 - DNA, 505 bp, Artificial
  Mutation introduced by TALE nuclease pair POT33_T02 within a POT33 allele
caagtgtgtgcaatagtagttctactactacaactctcaaaactcctttcatttcatccaatacttctttaggttccactcctaagccctctcaacttttcctccatggaaaacgtaacaaaactttcaaagtctcttgcaaagtttctaatagtggtgaccaaacgaattctgttgatcgaagaaatgttcttcttggcttaggaggtctttatggtgttgctaatgctataccattagcagcatcggctactcctataccatcccctgatctcaaaacttgtggtagagccaccatatcggatggtccactagtaccctatacttgttgcccccctcctatgccaactaactttgacaccattccatattacaagttcccttctatgactaaactccgtatccgtcccctgctcatgctgttgatgaggagtatattgctaagtataatttggccataagtcgaatgaaagatcttgataagacagaccctttaaaccctctt

SEQ ID NO: 1744 - DNA, 460 bp, Artificial
  Mutation introduced by TALE nuclease pair POT33_T02 within a POT33 allele
caagtgtgtgcaatagtagttctactactacaactctcaaaactcctttcatttcatccaatacttctttaggttccactcctaagcccctctcaacctttactccatggaaaacgtaacaaaactttcaaagtctcttgcaaagtttctaatagtggtgaccaaaaccaattctgttgatcgaagaaatgttcttcttggcttaggaggtctttatggtgttgctaatgctataccattagcagcatcggctactcctataccatcccctgatctcaaaacttgtggtagagccaccatatcggatggtccactagtaccctatacttgttgcccccctcctcatgccaactaactttgtacaccacttccatattcacaagttcccttcctatgactaaactccagtactccgtcccctgctccatgctgttgatgaggagtatattgctaagtataa

SEQ ID NO: 1745 - DNA, 499 bp, Artificial
  Mutation introduced by TALE nuclease pair POT33_T02 within a POT33 allele
caagtgtgtgcaatagtagttctactactacaactctcaaaactcctttcatttcatccaatacttctttaggttccactcctaagcccctctcaacttttcctccatggaaaacgtaacaaaactttcaaagtctcttgcaaagtttctaatagtggtgaccaaaaccaaaacaattctgttgatcgaagaaatgttcttcttggcttaggaggtctttatggtgttgctaatgctataccattagcagcatcggctactcctataccatcccctgatctcaaaacttgtggtagagccaccatatcggatggtccactagtaccctatacttgttgcccccctcctatgccaactaactttgacaccattccatattacaagttcccttctatgactaaactccgtatccgtcccctgctcatgctgttgatgaggagtatattgctaagtataatttggccataagtcgaatgaaagatcttgataagacagaccc

SEQ ID NO: 1746 - DNA, 514 bp, Artificial
  Mutation introduced by TALE nuclease pair POT33_T02 within a POT33 allele
caaggtgtgtgcaatagtagttctactactacaactctcaaaactcctttcatttcatccaatacttctttaggttccactcctaagccctctcaacttttcctccatggaaaacgtaacaaaactttcaaagtctcttgcaaagtttctaatagtggtgaccaaaaccaaaaacgaattctgttgatcgaagaaatgttcttcttggcttaggaggtctttatggtgttgctaatgctataccattagcagcatcggctactcctataccatcccctgatctcaaaacttgtggtagagccaccatatcggatggtccactagtaccctatacttgttgcccccctcctatgccaactaactttgacaccattccatattacaagttcccttctatgactaaactccgtatccgtcccctgctcatgctgttgatgaggagtatattgctaagtataatttggccataagtcgaatgaaagatcttgataagacagaccctttaaaccctctt

SEQ ID NO: 1747 - DNA, 507 bp, Artificial
  Mutation introduced by TALE nuclease pair POT33_T02 within a POT33 allele
caagtgtgtgcaatagtagttctactactacaactctcaaaactcctttcatttcatccaatacttctttaggttccactcctaagccctctcaacttttcctccatggaaaacgtaacaaaactttcaaagtctcttgcaaagtttctaatagtggtgaccaaaaccaaaattctgttgatcgaagaaatgttcttcttggcttaggaggtctttatggtgttgctaatgctataccattagcagcatcggctactcctataccatcccctgatctcaaaacttgtggtagagccaccatatcggatggtccactagtaccctatacttgttgcccccctcctatgccaactaactttgacaccattccatattacaagttcccttctatgactaaactccgtatccgtcccctgctcatgctgttgatgaggagtatattgctaagtataatttggccataagtcgaatgaaagatcttgataagacagaccctttaaaccctct

SEQ ID NO: 1748 - DNA, 500 bp, Artificial
  Mutation introduced by TALE nuclease pair POT33_T02 within a POT33 allele
caagtgtgtgcaatagtagttctactactacaactctcaaaactcctttcatttcatccaatacttctttaggttccactcctaagcccctctcaacttttcctccatggaaaacgtaacaaaactttcaaagtctcttgcaaagtttctaatagtggtgaccaaaaccaaaacgaattctgttgatcgaagaaatgttcttcttggcttaggaggtctttatggtgttgctaatgctataccattagcagcatcggctactcctataccatcccctgatctcaaaacttgtggtagagccaccatatcggatggtccactagtaccctatacttgttgcccccctcctatgccaactaactttgacaccattccatattacaagttcccttctatgactaaactccgtatccgtcccctgctcatgctgttgatgaggagtatattgctaagtataatttggccataagtcgaatgaaagatcttgataagacagaccc

SEQ ID NO: 1749 - DNA, 485 bp, Artificial
  Mutation introduced by TALE nuclease pair POT33_T02 within a POT33 allele
caagtgtgtgcaatagtagttctactactacaactctcaaaactcctttcatttcatccaatacttctttaggttccactcctaagcccctctcaacttttcctccatggaaaacgtaacaaaactttcaaagtctcttgcaaagtttctaatagtggagaaatgttcttcttggcttaggaggtctttatggtgttgctaatgctataccattagcagcatcggctactcctataccatcccctgatctcaaaacttgtggtagagccaccatatcggatggtccactagtaccctatacttgttgcccccctcctatgccaactaactttgacaccattccatattacaagttcccttctatgactaaactccgtatccgtccccctgctcatgctgttgatgaggagtatattgctaagtataattttggccataagtcgaatgaaagatcttgataagacagaccctttaaaccctcttgg

SEQ ID NO: 1750 - DNA, 515 bp, Artificial
  Mutation introduced by TALE nuclease pair POT33_T02 within a POT33 allele
caagtgtgtgcaatagtagttctactactacaactctcaaaactcctttcatttcatccaatacttctttaggttccactcctaagcccctctcaacttttcctccatggaaaacgtaacaaaactttcaaagtctcttgcaaagtttctaatagtggtgaccaaaaccaaaacgaattctgttgatcgaagaaatgttcttcttggcttaggaggtctttatggtgttgctaatgctataccattagcagcatcggctactcctataccatcccctgatctcaaaacttgtggtagagccaccatatcggatggtccactagtaccctatacttgttgcccccctcctatgccaactaactttgacaccattccatattacaagttcccttctatgactaaactccgtatccgtcccctgctccatgctgttgatgaggagtatattgctaagtataatttggctataagtcgaatgaaagatcttgataagacagacccttttaaaccctctt

SEQ ID NO: 1751 - DNA, 505 bp, Artificial
  Mutation introduced by TALE nuclease pair POT33_T02 within a POT33 allele
caagtgtgtgcaatagtagttctactactacaactctcaaaactcctttcatttcatccaatacttctttaggttccactcctaagccctctcaacttttcctccatggaaaacgtaacaaaactttcaaagtctcttgcaaagtttctaatagtggtgaccaaaaccaaaaacgaattctgttgatcgaagaaatgttcttcttggcttaggaggtctttatggtgttgctaatgctataccattagcagcatcggctactcctataccatcccctgatctcaaaacttgtggtagagccaccatatcggatggtccactagtaccctatacttgttgcccccctcctatgccaactaactttgacaccattccatattacaagttcccttctatgactaaactccgtatccgtcccctgctccatgctgttgatgaggagtatattgctaaagtataatttggccataagtcgaatgaaagatcttgataagacagacccttt

SEQ ID NO: 1752 - DNA, 513 bp, Artificial
  Mutation introduced by TALE nuclease pair POT33_T02 within a POT33 allele
caagtgtgtgcaatagtagttctactactacaactctcaaaactcctttcatttcatccaatacttctttaggttccactcctaagcccctctcaacttttcctccatggaaaacgtaacaaaactttcaaagtctcttgcaaagtttctaatagtggtgaccaaaaccaaaacgaattctgttgatcgaagaaatgttcttcttggcttaggaggtctttatggtgttgctaatgctataccattagcagcatcggctactcctataccatccactgatctcaaaacttgtggtagagccaccatatcggatggtccactagtaccctatacttgttgcccccctcctatgccaactaactttgacaccattccatattacaagttcccttctatgactaaactccgtatccgtcccctgctcatgctgttgatgaggagtatattgctaagtataatttggccataagtcgaatgaaagatcttgataagacagaccctttaaaccctctt

SEQ ID NO: 1753 - DNA, 505 bp, Artificial
  Mutation introduced by TALE nuclease pair POT33_T02 within a POT33 allele
caagtgtgtgcaatagtagttctactactacaactctcaaaactcctttcatttcatccaatacttctttaggttccactcctaagcccctctcaacttttcctccatggaaaacgtaacaaaactttcaaagtctcttgcaaagtttctaatagtggtgaccaaaaccaaaacaaaacgaattctgttgatcgaagaaatgttcttcttggcttaggaggtctttatggtgttgctaatgctataccattagcagcatcggctactcctataccatcccctgatctcaaaacttgtggtagagccaccatatcggatggtccactagtaccctatacttgttgcccccctcctatgccaactaactttgacaccattccatattacaagttcccttctatgactaaactccgtatccgtcccctgctcatgctgttgatgaggagtatattgctaagtataatttggccataagtcgaatgaaagatcttgataagacagaccc

SEQ ID NO: 1754 - DNA, 503 bp, Artificial
  Mutation introduced by TALE nuclease pair POT33_T02 within a POT33 allele
caagtgtgtgcaatagtagttctactactacaactctcaaaactcctttcatttcatccaatacttctttaggttccactcctaagccctctcaacttttcctccatggaaaacgtaacaaaactttcaaagtctcttgcaaagtttctaatagtggtgaccatgattgatcgaagaaatgttcttcttggcttaggaggtctttatggtgttgctaatgctataccattagcagcatcggctactcctataccatcccctgatctcaaaacttgtggtagagccaccatatcggatggtccactagtaccctatacttgttgcccccctcctatgccaactaactttgtacaccattccattattcacaagttcccttcctatgactaaactccagtatccgtcccctgctccatgctgttgatgaggagtatattgctaagtataatttggccataagtcgaatgaaagatcttgataagacagaccctttaaaccctctt

SEQ ID NO: 1755 - DNA, 445 bp, Artificial
  Mutation introduced by TALE nuclease pair POT33_T02 within a POT33 allele
caagtgtgtgcaatagtagttctactactacaactctcaaaactcctttcatttcatccaatacttctttaggttccactcctaagccctctcaacttttcctccatggaaaacgtaacaaaactttcaaagtctcttgcaaagtttctaatagtggtgaccaaaacaataatcgaaacattctgttgatcgaagaaatgttcttcttggcttaggaggtctttatggtgttgctaatgctataccattagcagcatcggctactcctataccatcccctgatctcaaaacttgtggtagagccaccatatcggatggtccactagtaccctatacttgttgcccccctcctatgccaactaactttgtacaccattccattattcacaagttcccttcctatgactaaactccagtatccgtcccctgctccatgctgttgatg

SEQ ID NO: 1756 - DNA, 500 bp, Artificial
  Mutation introduced by TALE nuclease pair POT33_T02 within a POT33 allele
caagtgtgtgcaatagtagttctactactacaactctcaaaactcctttcatttcatccaatacttctttaggttccactcctaagcccctctcaacttttcctccatggaaaacgtaacaaaactttcaaagtctcttgcaaagtttctaatagtggtgaccaaaaaccaatttgattctgttcgaagaaatgttcttcttggcttaggaggtctttatggtgttgctaatgctataccattagcagcatcggctactcctataccatcccctgatctcaaaacttgtggtagagccaccatatcggatggtccactagtaccctatacttgttgcccccctcctatgccaactaactttgacaccattccatattacaagttcccttctatgactaaactccgtatccgtcccctgctcatgctgttgatgaggagtatattgctaagtataatttggccataagtcgaatgaaagatcttgataagacagacccttt

SEQ ID NO: 1757 - DNA, 513 bp, Artificial
  Mutation introduced by TALE nuclease pair POT33_T02 within a POT33 allele
caagtgtgtgcaatagtagttctactactacaactctcaaaactcctttcatttcatccaatacttctttaggttccactcctaagccctctcaacttttcctccatggaaaacgtaacaaaactttcaaagtctcttgcaaagtttctaatagtggtgaccaaaacaaatgaaacattctgttgatcgaagaaatgttcttcttggcttaggaggtctttatggtgttgctaatgctataccattagcagcatcggctactcctataccatcccctgatctcaaaacttgtggtagagccaccatatcggatggtccactagtaccctatacttgttgcccccctcctatgccaactaactttgacaccattccatattacaagttcccttctatgactaaactccgtatccgtcccctgctcatgctgttgatgaggagtatattgctaagtataatttggccataagtcgaatgaaagatcttgataagacagaccctttaaaccctctt

SEQ ID NO: 1758 - DNA, 517 bp, Artificial
  Mutation introduced by TALE nuclease pair POT33_T02 within a POT33 allele
caagtgtgtgcaatagtagttctactactacaactctcaaaactcctttcatttcatccaatacttctttaggttccactcctaagcccctctcaacttttcctccatggaaaacgtaacaaaactttcaaagtctcttgcaaagtttctaatagtggtgaccaaaacaataatcgaaacattctgttgatcgaagaaatgttcttcttggcttaggaggtctttatggtgttgctaatgctataccattagcagcatcggctactcctataccatcccctgatctcaaaacttgtggtagagccaccatatcggatggtccactagtaccctatacttgttgcccccctcctatgccaactaactttgacaccattccatattacaagttcccttctatgactaaactccgtatccgtcccctgctcatgctgttgatgaggagtatattgctaagtataatttggccataagtcgaatgaaagatcttgataagacagaccctttaaaccctctt

SEQ ID NO: 1759 - DNA, 518 bp, Artificial
  Mutation introduced by TALE nuclease pair POT33_T02 within a POT33 allele
caagtgtgtgcaatagtagttctactactacaactctcaaaactcctttcatttcatccaatacttctttaggttccactcctaagcccctctcaacttttcctccatggaaaacgtaacaaaactttcaaagtctcttgcaaagtttctaatagtggtgaccaaaaccaaaacaaacgaattctgttgatcgaagaaatgttcttcttggcttaggaggtctttatggtgttgctaatgctataccattagcagcatcggctactcctataccatcccctgatctcaaaacttgtggtagagccaccatatcggatggtccactagtaccctatacttgttgcccccctcctatgccaactaactttgacaccattccatattacaagttcccttctatgactaaactccgtatccgtcccctgctccatgctgttgatgaggagtatattgctaagtataatttggccataagtcgaatgaaagatcttgataagacagaccctttaaaccctctt

SEQ ID NO: 1760 - DNA, 490 bp, Artificial
  Mutation introduced by TALE nuclease pair POT33_T02 within a POT33 allele
caagtgtgtgcaatagtagttctactactacaactctcaaaactcctttcatttcatccaatacttctttaggttccactcctaagccctctcaacttttcctccatggaaaacgtaacaaaactttcaaagtctcttgcaaagtttctaatagtggtgaccaaaaccaaacgaattctgttgatcgaagaatgttcttcttggcttaggaggtctttatggtgttgctaatgctataccattagcagcatcggctactcctataccatcccctgatctcaaaacttgtggtagagccaccatatcggatggtccactagtaccctatacttgttgcccccctcctatgccaactaactttgacaccattccatattacaagttcccttctatgactaaactccgtatccgtcccctgctcatgctgttgatgaggagtatattgctaagtataattttggccataagtcgaatgaaagatcttgataag

SEQ ID NO: 1761 - DNA, 501 bp, Artificial
  Mutation introduced by TALE nuclease pair POT33_T02 within a POT33 allele
  misc_feature (211): n is a or c or t or g
caagtgtgtgcaatagtagttctactactacaactctcaaaactcctttcatttcatccaatacttctttaggttccactcctaagcccctctcaacttttcctccatggaaaacgtaacaaaactttcaaagtctcttgcaaagtttctaatagtggtgaccaaaaccaaaacgaattctgttgatcgaagaaatgttcttcttggcttnggaggtctttatggtgttgctaatgctataccattagcagcatcggctactcctataccatcccctgatctcaaaacttgtggtagagccaccatatcggatggtccactagtaccctatacttgttgcccccctcctatgccaactaactttgacaccattccatattacaagttcccttctatgactaaactccgtatccgtccccctgctcatgctgttgatgaggagtatattgctaagtataatttggccataagtcgaatgaaagatcttgataagacagaccc

SEQ ID NO: 1762 - DNA, 510 bp, Artificial
  Mutation introduced by TALE nuclease pair POT33_T02 within a POT33 allele
caagtgtgtgcaatagtagttctactactacaactctcaaaactcctttcatttcatccaatacttctttaggttccactcctaagccctctcaacttttcctccatggaaaacgtaacaaaactttcaaagtctcttgcaaagtttctaatagtggtgaccaaaaccaattgaattctgttgatcgaagaaatgttcttcttggcttaggaggtctttatggtgttgctaatgctataccattagcagcatcggctactcctataccatcccctgatctcaaaacttgtggtagagccaccatatcggatggtccactagtaccctatacttgttgcccccctcctatgccaactaactttgacaccattccatattacaagttcccttctatgactaaactccgtatccgtcccctgctcatgctgttgatgaggagtatattgctaagtataatttggccataagtcgaatgaaagatcttgataagacagaccctttaaaccctct

SEQ ID NO: 1763 - DNA, 517 bp, Artificial
  Mutation introduced by TALE nuclease pair POT33_T02 within a POT33 allele
caagtgtgtgcaatagtagttctactactacaactctcaaaactcctttcatttcatccaatacttctttaggttccactcctaagccctctcaacttttcctccatggaaaacgtaacaaaactttcaaagtctcttgcaaagtttctaatagtggtgaccaaaaccaaaacaaaacgaattctgttgatcgaagaaatgttcttcttggcttaggaggtctttatggtgttgctaatgctataccattagcagcatcggctactcctataccatcccctgatctcaaaacttgtggtagagccaccatatcggatggtccactagtaccctatacttgttgcccccctcctatgccaactaactttgacaccattccatattacaagttcccttctatgactaaactccgtatccgtcccctgctcatgctgttgatgaggagtatattgctaagtataatttggccataagtcgaatgaaagatcttgataagacagaccctttaaaccctctt

SEQ ID NO: 1764 - DNA, 505 bp, Artificial
  Mutation introduced by TALE nuclease pair POT33_T02 within a POT33 allele
  misc_feature (362): n is a or c or t or g
caagtgtgtgcaatagtagttctactactacaactctcaaaactcctttcatttcatccaatacttctttaggttccactcctaagcccctctcaacttttcctccatggaaaacgtaacaaaactttcaaagtctcttgcaaagtttctaatagtggtgaccaaaaccaaaacattgagaagaaatgttcttcttggcttaggaggtctttatggtgttgctaatgctataccattagcagcatcggctactcctataccatcccctgatctcaaaacttgtggtagagccaccatatcggatggtccactagtaccctatacttgttgcccccctcctatgccaactaactttgacaccnttccatattacaagttcccttctatgactaaactccgtatccgtcccctgctccatgctgttgatgaggagtatattgctaagtataatttggccataagtcgaatgaaagatcttgataagacagaccctttaaaccctctt

SEQ ID NO: 1765 - DNA, 513 bp, Artificial
  Mutation introduced by TALE nuclease pair POT33_T02 within a POT33 allele
caagtgtgtgcaatagtagttctactactacaactctcaaaactcctttcatttcatccaatacttctttaggttccactcctaagcccctctcaacttttcctccatggaaaacgtaacaaaactttcaaagtctcttgcaaagtttctaatagtggtgaccaaaaccaaaacgaattctgttgatcgaagaaatgttcttcttggcttaggaggtctttatggtgttgctaatgctataccattagcagcatcggctactcctataccatcccctgatctcaaaacttgtggtagagccaccatatcggatggtccactagtaccctatacttgttgcccccctcctatgccaactaactttgtacaccacttccatattcacaagttcccttcctatgactaaactccagtatccgtcccctgctccatgctgttgatgaggagtatattgctaagtataattttggccataagtcgaatgaaagatcttgataagacagaccctttaaa

SEQ ID NO: 1766 - DNA, 472 bp, Artificial
  Mutation introduced by TALE nuclease pair POT33_T02 within a POT33 allele
caagtgtgtgcaatagtagttctactactacaactctcaaaactcctttcatttcatccaatacttctttaggttccactcctaagcccctctcaacttttcctccatggaaaacgtaacaaaactttcaaagtctcttgcaaagtttctaatagtggtgaccaaaaccaaacgaattctgttgatcgaagaaatgttcttcttggcttaggaggtctttatggtgttgctaatgctataccattagcagcatcggctactcttataccatcccctgatctcaaaacttgtggtagagccaccatatcggatggtccactagtaccctatacttgttgcccccctcctatgccaactaactttgtacaccacttccatattcacaagtttcccttccttatgactaaactccagtactccgtcccctgctccatgctgttgatgatggagtatagttgctaagtataatttt

SEQ ID NO: 1767 - DNA, 504 bp, Artificial
  Mutation introduced by TALE nuclease pair POT33_T02 within a POT33 allele
caagtgtgtgcaatagtagttctactactacaactctcaaaactcctttcatttcatccaatacttctttaggttccactcctaagcccctctcaacctttactcctggaaaacgtacaaaactttcaaagtctcttgcaaagtttctaatagtggtgccaaaaccaattctgttgatcgaagaaatgttcttcttggcttaggaggtctttatggtgttgctaatgctataccattagcagcatcggctactcctataccatcccctgatctcaaaacttgtggtagagccaccatatcggatggtccactagtaccctatacttgttgcccccctcctatgccaactaactttgacaccattccatattacaagttcccttctatgactaaactccgtatccgtcccctgctcatgctgttgatgaggagtatattgctaagtataatttggccataagtcgaatgaaagatcttgataagacagaccctttaaaccctctt

SEQ ID NO: 1768 - DNA, 509 bp, Artificial
  Mutation introduced by TALE nuclease pair POT33_T02 within a POT33 allele
caagtgtgtgcaatagtagttctactactacaactctcaaaactcctttcatttcatccaatacttctttaggttccactcctaagcccctctcaacttttcctccatggaaaacgtaacaaaactttcaaagtctcttgcaaagtttctaatagtggtgaccaaaaccaaattctgttgatcgaagaaatgttcttcttggcttaggaggtctttatggtgttgctaatgctataccattagcagcatcggctactcctataccatcccctgatctcaaaacttgtggtagagccaccatatcggatggtccactagtaccctatacttgttgcccccctcctatgccaactaactttgacaccattccatattacaagttcccttctatgactaaactccgtatccgtcccctgctccatgctgttgatgaggagtatattgctaagtataatttggccataagtcgaatgaaagatcttgataagacagaccctttaaaccctctt

SEQ ID NO: 1769 - DNA, 518 bp, Artificial
  Mutation introduced by TALE nuclease pair POT33_T02 within a POT33 allele
caagtgtgtgcaatagtagttctactactacaactctcaaaactcctttcatttcatccaatacttctttaggttccactcctaagcccctctcaacttttcctccatggaaaacgtaacaaaactttcaaagtctcttgcaaagtttctaatagtggtgaccaaaaccaaacaatcgaaaattctgttgatcgaagaaatgttcttcttggcttaggaggtctttatggtgttgctaatgctataccattagcagcatcggctactcctataccatcccctgatctcaaaacttgtggtagagccaccatatcggatggtccactagtaccctatacttgttgcccccctcctatgccaactaactttgacaccattccatattacaagttcccttctatgactaaactccgtatccgtcccctgctcatgctgttgatgaggagtatattgctaagtataatttggccataagtcgaatgaaagatcttgataagacagaccctttaaaccctctt

SEQ ID NO: 1770 - DNA, 445 bp, Artificial
  Mutation introduced by TALE nuclease pair POT33_T02 within a POT33 allele
caagtgtgtgcaatagtagttctactactacaactctcaaaactcctttcatttcatccaatacttctttaggttccactcctaagccctctcaacttttcctccatggaaaacgtaacaaaactttcaaagtctcttgcaaagtttctaatagtggtgaccaaaaccaaaacatagaattctgttgatcgaagaaatgttcttcttggcttaggaggtctttatggtgttgctaatgctataccattagcagcatcggctactcctataccatcccctgatctcaaaacttgtggtagagccaccatatcggatggtccactagtaccctatacttgttgcccccctcctatgccaactaactttgtacaccacttccatattcacaagttcccttcctatgactaaactccagtatccgtcccctgctccatgctgttgatga

SEQ ID NO: 1771 - DNA, 439 bp, Artificial
  Mutation introduced by TALE nuclease pair POT33_T02 within a POT33 allele
  misc_feature (436): n is a or c or t or g
caagtgtgtgcaatagtagttctactactacaactctcaaaactcctttcatttcatccaatacttctttaggttccactcctaagccctctcaacttttcctccatggaaaacgtaacaaaactttcaaagtctcttgcaaagtttctaatagtggtgaccaaaaccaaaacattgagaagaaatgttcttcttggcttaggaggtctttatggtgttgctaatgctataccattagcagcatcggctactcctataccatcccctgatctcaaaacttgtggtagagccaccatatcggatggtccactagtaccctatacttgttgcccccctcctatgccaactaactttgacaccattccatattacaagttcccttctaattgactaaactaccgtctcgtccctcgctccatgctgttgatgtaggagnata

SEQ ID NO: 1772 - DNA, 507 bp, Artificial
  Mutation introduced by TALE nuclease pair POT33_T02 within a POT33 allele
caagtgtgtgcaatagtagttctactactacaactctcaaaacctcctttcatttcatccaatacttctttaggttccactcctaagcccctctcaacttttcctccatggaaaacgtaacaaaactttcaaagtctcttgcaaagtttctaatagtggtgaccaaaaccaaatgaaacattctgttgatcgaagaaatgttcttcttggcttaggaggtctttatggtgttgctaatgctataccattagcagcatcggctactcctataccatcccctgatctcaaaacttgtggtagagccaccatatcggatggtccactagtaccctatacttgttgcccccctcctatgccaactaactttgacaccattccatattacaaagttcccttctatgactaaactccgtatccgtcccctgctcatgctgttgatgaggagtatattgctaagtataatttggccataagtcgaatgaaagatcttgataagacagacccttt

SEQ ID NO: 1773 - DNA, 501 bp, Artificial
  Mutation introduced by TALE nuclease pair POT33_T02 within a POT33 allele
caagtgtgtgcaatagtagttctactactacaactctcaaaactcctttcatttcatccaatacttctttaggttccactcctaagcccctctcaacttttcctccatggaaaacgtaacaaaactttcaaagtctcttgcaaagtttctaatagtggtgaccatatgattgattcgaagaaatgttcttcttggcttaggaggtctttatggtgttgctaatgctataccattagcagcatcggctactcctataccatcccctgatctcaaaacttgtggtagagccaccatatcggatggtccactagtaccctatacttgttgcccccctcctatgccaactaactttgacaccattccatattacaagttcccttctatgactaaactccgtatccgtcccctgctcatgctgttgatgaggagtatattgctaagtataatttggccataagtcgaatgaaagatcttgataagacagaccctttaaaccctctt

SEQ ID NO: 1774 - DNA, 534 bp, Artificial
  Mutation introduced by TALE nuclease pair POT33_T02 within a POT33 allele
caagtgtgtgcaatagtagttctactactacaactctcaaaactcctttcatttcatccaatacttctttaggttccactcctaagcccctctcaacttttcctccatggaaaacgtaacaaaactttcaaagtctcttgcaaagtttctaatagtggtgaccaaaaccaaaacgaattctgttgatcgaagaaatgttcttcttggcttaggaggtctttatggtgttgctaatgctataccattagcagcatcggctactcctataccatcccctgatctcaaaacttgtggtagagccaccatatcggatggtccactagtaccctatacttgttgcccccctcctatgccaactaactttgacaccattccatattacaagttcccttctatgactaaactccgtatccgtcccctgctcatgctgttgatgaggagtatattgctaagtataatttggccataagtcgaatgaaagatcttgataagacagaccctttaaaccctcttggctgagattgccaaggcaca

SEQ ID NO: 1775 - DNA, 509 bp, Artificial
  Mutation introduced by TALE nuclease pair POT33_T02 within a POT33 allele
caagtgtgtgcaatagtagttctactactacaactctcaaaactcctttcatttcatccaatacttctttaggttccactcctaagcccctctcaacttttcctccatggaaaacgtaacaaaactttcaaagtctcttgcaaagtttctaatagtggtgaccaaaaccaaatttctgttgatcgaagaaatgttcttcttggcttaggaggtctttatggtgttgctaatgctataccattagcagcatcggctactcctataccatcccctgatctcaaaacttgtggtagagccaccatatcggatggtctactagtaccctatacttgttgcccccctcctatgccaactaactttgacaccattccatattacaagttcccttctatgactaaactccgtatccgtcccctgctcatgctgttgatgaggagtatattgctaagtataatttggccataagtcgaatgaaagatcttgataagacagaccctttaaaccctctt

SEQ ID NO: 1776 - DNA, 504 bp, Artificial
  Mutation introduced by TALE nuclease pair POT33_T02 within a POT33 allele
caagtgtgtgcaatagtagttctactactacaactctcaaaactcctttcatttcatccaatacttctttaggttccactcctaagccctctcaacttttcctccatggaaaacgtaacaaaactttcaaagtctcttgcaaagtttctaatagtggtgaccaaaaccaactgttgatcgaagaaatgttcttcttggcttaggaggtctttatggtgttgctaatgctataccattagcagcatcggctactcctataccatcccctgatctcaaaacttgtggtagagccaccatatcggatggtccactagtaccctatacttgttgcccccctcctatgccaactaactttgacaccattccatattacaagttcccttctatgactaaactccgtatccgtcccctgctcatgctgttgatgaggagtatattgctaagtataatttggccataagtcgaatgaaagatcttgataagacagaccctttaaaccctctt

SEQ ID NO: 1777 - DNA, 506 bp, Artificial
  Mutation introduced by TALE nuclease pair POT33_T02 within a POT33 allele
caagtgtgtgcaatagtagttctactactacaactctcaaaactcctttcatttcatccaatacttctttaggttccactcctaagccctctcaacttttcctccatggaaaacgtaacaaaactttcaaagtctcttgcaaagtttctaatagtggtgaccaaaacgaattctgttgatcgaagaaatgttcttcttggcttaggaggtctttatggtgttgctaatgctataccattagcagcatcggctactcctataccatcccctgatctcaaaacttgtggtagagccaccatatcggatggtccactagtaccctatacttgttgcccccctcctatgccaactaactttgacaccattccatattacaagttcccttctatgactaaactccgtatccgtcccctgctcatgctgttgatgaggagtatattgctaagtataatttggccataagtcgaatgaaagatcttgataagacagaccctttaaaccctctt

SEQ ID NO: 1778 - DNA, 511 bp, Artificial
  Mutation introduced by TALE nuclease pair POT33_T02 within a POT33 allele
caagtgtgtgcaatagtagttctactactacaactctcaaaactcctttcatttcatccaatacttctttaggttccactcctaagcccctctcaacttttcctccatggaaaacgtaacaaaactttcaaagtctcttgcaaagtttctaatagtggtgaccaaaaccaaaacaattctgttgatcgaagaaatgttcttcttggcttaggaggtctttatggtgttgctaatgctataccattagcagcatcggctactcctataccatcccctgatctcaaaacttgtggtagagccaccatatcggatggtccactagtaccctatacttgttgcccccctcctatgccaactaactttgacaccattccatattacaagttcccttctatgactaaactccgtatccgtcccctgctcatgctgttgatgaggagtatattgctaagtataatttggccataagtcgaatgaaagatcttgataagacagaccctttaaaccctct

SEQ ID NO: 1779 - DNA, 516 bp, Artificial
  Mutation introduced by TALE nuclease pair POT33_T02 within a POT33 allele
caagtgtgtgcaatagtagttctactactacaactctcaaaactcctttcatttcatccaatacttctttaggttccactcctaagcccctctcaacttttcctccatggaaaacgtaacaaaactttcaaagtctcttgcaaagtttctaatagtggtgaccaaaaccaaaacaaaattctgttgatcgaagaaatgttcttcttggcttaggaggtctttatggtgttgctaatgctataccattagcagcatcggctactcctataccatcccctgatctcaaaacttgtggtagagccaccatatcggatggtccactagtaccctatacttgttgcccccctcctatgccaactaactttgacaccattccatattacaagttcccttctatgactaaactccgtatccgtcccctgctcatgctgttgatgaggagtatattgctaagtataatttggccataagtcgaatgaaagatcttgataagacagaccctttttaaaccctctt

SEQ ID NO: 1780 - DNA, 518 bp, Artificial
  Mutation introduced by TALE nuclease pair POT33_T02 within a POT33 allele
caagtgtgtgcaatagtagttctactactacaactctcaaaactcctttcatttcatccaatacttctttaggttccactcctaagcccctctcaacttttcctccatggaaaacgtaacaaaactttcaaagtctcttgcaaagtttctaatagtggtgaccaaaaccaaatatcgaaacattctgttgatcgaagaaatgttcttcttggcttaggaggtctttatggtgttgctaatgctataccattagcagcatcggctactcctataccatcccctgatctcaaaacttgtggtagagccaccatatcggatggtccactagtaccctatacttgttgcccccctcctatgccaactaactttgacaccattccatattacaagttcccttctatgactaaactccgtatccgtcccctgctcatgctgttgatgaggagtatattgctaagtataatttggccataagtcgaatgaaagatcttgataagacagaccctttaaaccctctt

SEQ ID NO: 1781 - DNA, 514 bp, Artificial
  Mutation introduced by TALE nuclease pair POT33_T02 within a POT33 allele
caagtgtgtgcaatagtagttctactactacaactctcaaaactcctttcatttcatccaatacttctttaggttccactcctaagcccctttcaacttttcctccatggaaaacgtaacaaaactttcaaagtctcttgcaaagtttctaatagtggtgaccaaaaccaaaaacgaattctgttgatcgaagaaatgttcttcttggcttaggaggtctttatggtgttgctaatgctataccattagcagcatcggctactcctataccatcccctgatctcaaaacttgtggtagagccaccatatcggatggtccactagtaccctatacttgttgcccccctcctatgccaactaactttgacaccattccatattacaagttcccttctatgactaaactccgtatccgtcccctgctcatgctgttgatgaggagtatattgctaagtataatttggccataagtcgaatgaaagatcttgataagacagaccctttaaaccctctt

SEQ ID NO: 1782 - DNA, 497 bp, Artificial
  Mutation introduced by TALE nuclease pair POT33_T02 within a POT33 allele
caagtgtgtgcaatagtagttctactactacaactctcaaaactcctttcatttcatccaatacttctttaggttccactcctaagccctctcaacttttcctccatggaaaacgtaacaaaactttcaaagtctcttgcaaagtttctaatagtggtgaccaaaaccaaaacattctgttgatcgaagaaatgttcttcttggcttaggaggtctttatggtgttgctaatgctataccattagcagcatcggctactcctataccatcccctgatctcaaaacttgtggtagagccaccatatcggatggtccactagtaccctatacttgttgcccccctcctatgccaactaactttgacaccattccatattacaagttcccttctatgactaaactccgtatccgtcccctgctcatgctgttgatgaggagtatattgctaagtataatttggccataagtcgaatgaaagatcttgataagacagaccc

SEQ ID NO: 1783 - DNA, 506 bp, Artificial
  Mutation introduced by TALE nuclease pair POT33_T02 within a POT33 allele
caagtgtgtgcaatagtagttctactactacaactctcaaaactcctttcatttcatccaatacttctttaggttccactcctaagcccctctcaacttttcctccatggaaaacgtaacaaaactttcaaagtctcttgcaaagtttctaatagtggtgaccaaacgaattctgttgatcgaagaaatgttcttcttggcttaggaggtctttatggtgttgctaatgctataccattagcagcatcggctactcctataccatcccctgatctcaaaacttgtggtagagccaccatatcggatggtccactagtaccctatacttgttgcccccctcctatgccaactaactttgacaccattccatattacaagttcccttctatgactaaactccgtatccgtcccctgctcatgctgttgatgaggagtatattgctaagtataatttggccataagtcgaatgaaagatcttgataagacagaccctttaaaccctctt

SEQ ID NO: 1784 - DNA, 482 bp, Artificial
  Mutation introduced by TALE nuclease pair POT33_T02 within a POT33 allele
caagtgtgtgcaatagtagttctactactacaactctcaaaactcctttcatttcatccaatacttctttaggttccactcctaagccctctcaacttttcctccatggaaaacgtaacaaaactttcaaagtctcttgcaaagtttctaatagtggtgaccaaacaaacgaattctgttgatcgaagaaatgttcttcttggcttaggaggtctttatggtgttgctaatgctataccattagcagcatcggctactcctataccatcccctgatctcaaaacttgtggtagagccaccatatcggatggtccactagtaccctatacttgttgcccccctcctatgccaactaactttgtacaccacttccattattcatcaagttcccattcctatgactaaactccagtatccgtcccctgctccatgctgttgatgaggagtatagttgctaagtataattttggccataagtcgaa

SEQ ID NO: 1785 - DNA, 502 bp, Artificial
  Mutation introduced by TALE nuclease pair POT33_T02 within a POT33 allele
  misc_feature (176): n is a or c or t or g
caagtgtgtgcaatagtagttctactactacaactctcaaaactcctttcatttcatccaatacttctttaggttccactcctaagccctctcaacttttcctccatggaaaacgtaacaaaactttcaaagtctcttgcaaagtttctaatagtggtgaccaaaaccaaaacatngaattctgttgatcgaagaaatgttcttcttggcttaggaggtctttatggtgttgctaatgctataccattagcagcatcggctactcctataccatcccctgatctcaaaacttgtggtagagccaccatatcggatggtccactagtaccctatacttgttgcccccctcctatgccaactaactttgacaccattccatattacaagttcccttctatgactaaactccgtatccgtcccctgctcatgctgttgatgaggagtatattgctaagtataatttggccataagtcgaatgaaagatcttgataagacagaccc

SEQ ID NO: 1786 - DNA, 514 bp, Artificial
  Mutation introduced by TALE nuclease pair POT33_T02 within a POT33 allele
caagtgtgtgcaatagtagttctactactacaactctcaaaactcctttcatttcatccaatacttctttaggttccactcctaagccctctcaacttttcctccatggaaaacgtaacaaaactttcaaagtctcttgcaaagtttctaatagtggtgaccaaaactgaaaacgaattctgttgatcgaagaaatgttcttcttggcttaggaggtctttatggtgttgctaatgctataccattagcagcatcggctactcctataccatcccctgatctcaaaacttgtggtagagccaccatatcggatggtccactagtaccctatacttgttgcccccctcctatgccaactaactttgacaccattccatattacaagttcccttctatgactaaactccgtatccgtcccctgctccatgctgttgatgaggagtatattgctaagtataatttggccataagtcgaatgaaagatcttgataagacagaccctttaaaccctctt

SEQ ID NO: 1787 - DNA, 502 bp, Artificial
  Mutation introduced by TALE nuclease pair POT33_T02 within a POT33 allele
caagtgtgtgcaatagtagttctactactacaactctcaaaactcctttcatttcatccaatacttctttaggttccactcctaagcccctctcaacttttcctccatggaaaacgtaacaaaactttcaaagtctcttgcaaagtttctaatagtggtgaccaactatgattgatcgaagaaatgttcttcttggcttaggaggtctttatggtgttgctaatgctataccattagcagcatcggctactcctataccatcccctgatctcaaaacttgtggtagagccaccatatcggatggtccactagtaccctatacttgttgcccccctcctatgccaactaactttgacaccattccatattacaagttcccttctatgactaaactccgtatccgtcccctgctcatgctgttgatgaggagtatattgctaagtataatttggccataagtcgaatgaaagatcttgataagacagaccctttaaaccctctt

SEQ ID NO: 1788 - DNA, 509 bp, Artificial
  Mutation introduced by TALE nuclease pair POT33_T02 within a POT33 allele
caagtgtgtgcaatagtagttctactactacaactctcaaaactcctttcatttcatccaatacttctttaggttccactcctaagcccctctcaacttttcctccatggaaaacgtaacaaaactttcaaagtctcttgcaaagtttctaatagtggtgaccaaaaccaaaactctgttgatcgaagaaatgttcttcttggcttaggaggtctttatggtgttgctaatgctataccattagcagcatcggctactcctataccatcccctgatctcaaaacttgtggtagagccaccatatcggatggtccactagtaccctatacttgttgcccccctcctatgccaactaactttgacaccattccatattacaagttcccttctatgactaaactccgtatccgtcccctgctcatgctgttgatgaggagtatattgctaagtataatttggccataagtcgaatgaaagatcttgataagacagaccctttaaaccctctt

SEQ ID NO: 1789 - DNA, 431 bp, Artificial
  Mutation introduced by TALE nuclease pair POT33_T02 within a POT33 allele
caagtgtgtgcaatagtagttctactactacaactctcaaaactcctttcatttcatccaatacttctttaggttccactcctaagccctctcaacttttcctccatggaaaacgtaacaaaactttcaaagtctcttgcaaagtttctaatagtggtgaccaaaaccaaaaaaacgaattctgttgatcgaagaaatgttcttcttggcttaggaggtctttatggtgttgctaaatgctataccattagcagcatcggctactcctataccatcccctgatctcaaaacttgtggtagagccaccaatatcggatggtccactagtaccctatacttgttgcccccctcctaatgccaactaaactttgacaccattccatattacaagttcccttctatgactaaaactccgtatccgtcccctgctc

SEQ ID NO: 1790 - DNA, 504 bp, Artificial
  Mutation introduced by TALE nuclease pair POT33_T02 within a POT33 allele
caagtgtgtgcaatagtagttctactactacaactctcaaaactcctttcatttcatccaatacttctttaggttccactcctaagcccctctcaacttttcctccatggaaaacgtaacaaaactttcaaagtctcttgcaaagtttctaatagtggtgaccaaaaccactgttgatcgaagaaatgttcttcttggcttaggaggtctttatggtgttgctaatgctataccattagcagcatcggctactcctataccatcccctgatctcaaaacttgtggtagagccaccatatcggatggtccactagtaccctatacttgttgcccccctcctatgccaactaactttgacaccattccatattacaagttcccttctatgactaaactccgtatccgtcccctgctcatgctgttgatgaggagtatattgctaagtataatttggccataagtcgaatgaaagatcttgataagacagaccctttaaaccctctt

SEQ ID NO: 1791 - DNA, 514 bp, Artificial
  Mutation introduced by TALE nuclease pair POT33_T02 within a POT33 allele
caagtgtgtgcaatagtagttctactactacaactctcaaaactcctttcatttcatccaatacttctttaggttccactcctaagcccctctcaactttttcctccatggaaaacgtaacaaaactttcaaagtctcttgcaaagtttctaatagtggtgaccaaaaccaaaacgaattctgttgatcgaagaaatgttcttcttggcttaggaggtctttatggtgttgctaatgctataccattagcagcatcggctactcctataccatcccctgatctcaaaacttgtggtagagccaccatatcggatggtccactagtaccctatacttgttgcccccctcctatgccaactaactttgacaccattccatattacaagttcccttctatgactaaactccgtatccgtcccctgctcatgctgttgatgaggagtatattgctaagtataatttggccataagtcgaatgaaagatcttgataagacagaccctttaaaccctctt

SEQ ID NO: 1792 - DNA, 516 bp, Artificial
  Mutation introduced by TALE nuclease pair POT33_T02 within a POT33 allele
caagtgtgtgcaatagtagttctactactacaactctcaaaactcctttcatttcatccaatacttctttaggttaccactcctaagcccctctcaacttttcctccatggaaaacgtaacaaaactttcaaagtctcttgcaaagtttctaatagtggtgaccaaaaccaaaacgaattctgttgatcgaagaaatgttcttcttggcttaggaggtctttatggtgttgctaatgctataccattagcagcatcggctactcctataccatccactgatctcaaaacttgtggtagagccaccatatcggatggtccactagtaccctatacttgttgcccccctcctatgccaactaactttgacaccattccattattacaagttcccttctatgactaaactccgtatccgtcccctgctcatgctgttgatgaggagtatgattgctaagtataatttggccataagtcgaatgaaagatcttgataagacagaccctttaaaccctctt

SEQ ID NO: 1793 - DNA, 511 bp, Artificial
  Mutation introduced by TALE nuclease pair POT33_T02 within a POT33 allele
caagtgtgtgcaatagtagttctactactacaactctcaaaactcctttcatttcatccaatacttctttaggttccactcctaagcccctctcaacttttcctccatggaaaacgtaacaaaactttcaaagtctcttgcaaagtttctaatagtggtgaccaaaaccaaaacaattctgttgatcgaagaaatgttcttcttggcttaggaggtctttatggtgttgctaatgctataccattagcagcatcggctactcctataccatcccctgatctcaaaacttgtggtagagccaccatatcggatggtccactagtaccctatacttgttgcccccctcctatgccaactaactttgacaccattccatattacaagttcccttctatgactaaactccgtatccgtccccgctcatgctgttgatgaggagtatattgctaagtataatttggccataagtcgaatgaaagatcttgataagacagaccctttaaaccctctt

SEQ ID NO: 1794 - DNA, 500 bp, Artificial
  Mutation introduced by TALE nuclease pair POT33_T02 within a POT33 allele
caagtgtgtgcaatagtagttctactactacaactctcaaaactcctttcatttcatccaatacttctttaggttccactcctaagccctctcaacttttcctccatggaaaacgtaacaaaactttcaaagtctcttgcaaagtttctaatagtggtgaccaattctgttgatcgaagaaatgttcttcttggcttaggaggtctttatggtgttgctaatgctataccattagcagcatcggctactcctataccatcccctgatctcaaaacttgtggtagagccaccatatcggatggtccactagtaccctatacttgttgcccccctcctatgccaactaactttgacaccattccatattacaagttcccttctatgactaaactccgtatccgtcccctgctcatgctgttgatgaggagtatattgctaagtataatttggccataagtcgaatgaaagatcttgataagacagaccctttaaaccctctt

SEQ ID NO: 1795 - DNA, 445 bp, Artificial
  Mutation introduced by TALE nuclease pair POT33_T02 within a POT33 allele
caagtgtgtgcaatagtagttctactactacaactctcaaaactcctttcatttcatccaatacttctttaggttccactcctaagccctctcaacttttcctccatggaaaacgtaacaaaactttcaaagtctcttgcaaagtttctaatagtggtgaccaaaaccaaaaacgaattctgttgatcgaagaaatgttcttcttggcttaggaggtctttatggtgttgctaatgctataccattagcagcatcggctactcctataccatcccctgatcctcaaaacttgtggtagagccaccatatcggatggtccactagtaccctatacttgttgcccccctcctatgccaactaactttgacaccacttccattattcacaagttcccattcctatgactaaactccagtatccgtcccctgctccatgctgttgatga

SEQ ID NO: 1796 - DNA, 513 bp, Artificial
  Mutation introduced by TALE nuclease pair POT33_T02 within a POT33 allele
caagtgtgtgcaatagtagttctactactacaactctcaaaactcctttcatttcatccaatacttctttaggttccactcctaagccctctcaacttttcctccatggaaaacgtaacaaaactttcaaagtctcttgcaaagtttctaatagtggtgaccaaaaccaaaacgaattctgttgatcgaagaaatgttcttcttggcttaggaggtctttatggtgttgctaatgctataccattagcagcatcggctactcctataccatcccctgatctcaaaacttgtggtagagccaccatatcggatggtccactagtaccctatacttgttgcccccctcctatgccaactaactttgacaccattccatattacaagttcccttctatgactaaactccgtatccgtccccctgctcatgctgttgatgaggagtatattgctaagtataatttggccataagtcgaatgaaagatcttgataagacagaccctttaaaccctctt

SEQ ID NO: 1797 - DNA, 514 bp, Artificial
  Mutation introduced by TALE nuclease pair POT33_T02 within a POT33 allele
caagtgtgtgcaatagtagttctactactacaactctcaaaactcctttcatttcatccaatacttctttaggttccactcctaagcccctctcaactttttcctccatggaaaacgtaacaaaactttcaaagtctcttgcaaagtttctaatagtggtgaccaaaaccaaacgaattctgttgatcgaagaaatgttcttcttggcttaggaggtctttatggtgttgctaatgctataccattagcagcatcggctactcctataccatcccctgatctcaaaacttgtggtagagccaccatatcggatggtccactagtaccctatacttgttgcccccctcctatgccaactaactttgacaccattccatattacaagtttcccttctatgactaaactccgtatccgtcccctgctcatgctgttgatgaggagtatattgctaagtataatttggccataagtcgaatgaaagatcttgataagacagaccctttaaaccctctt

SEQ ID NO: 1798 - DNA, 515 bp, Artificial
  Mutation introduced by TALE nuclease pair POT33_T02 within a POT33 allele
caagtgtgtgcaatagtagttctactactacaactctcaaaactcctttcatttcatccaatacttctttaggttccactcctaagccctctcaacttttcctccatggaaaacgtaacaaaactttcaaagtctcttgcaaagtttctaatagtggtgaccaaaaccaaatgaaacgattctgttgatcgaagaaatgttcttcttggcttaggaggtctttatggtgttgctaatgctataccattagcagcatcggctactcctataccatcccctgatctcaaaacttgtggtagagccaccatatcggatggtccactagtaccctatacttgttgcccccctcctatgccaactaactttgacaccattccatattacaagttcccttctatgactaaactccgtatccgtcccctgctcatgctgttgatgaggagtatattgctaagtataatttggccataagtcgaatgaaagatcttgataagacagaccctttaaaccctctt

SEQ ID NO: 1799 - DNA, 515 bp, Artificial
  Mutation introduced by TALE nuclease pair POT33_T02 within a POT33 allele
caagtgtgtgcaatagtagttctactactacaactctcaaaactcctttcatttcatccaatacttctttaggttccactcctaagccctctcaacttttcctccatggaaaacgtaacaaaactttcaaagtctcttgcaaagtttctaatagtggtgaccaaaaccaaaaacgaattctgttgatcgaagaaatgttcttcttggcttaggaggtctttatggtgttgctaatgctataccattagcagcatcggctactcctataccatcccctgatcctcaaaacttgatggtagagccaccatatcggatggtccactagtaccctatacttgttgcccccctcctatgccaactaactttgacaccattccatattacaagttcccttctatgactaaactccgtatccgtcccctgctcatgctgttgatgaggagtatattgctaagtataatttggccataagtcgaatgaaagatcttgataagacagaccctttaaaccctctt

SEQ ID NO: 1800 - DNA, 501 bp, Artificial
  Mutation introduced by TALE nuclease pair POT33_T02 within a POT33 allele
caagtgtgtgcaatagtagttctactactacaactctcaaaactcctttcatttcatccaatacttctttaggttccactcctaagccctctcaacttttcctccatggaaaacgtaacaaaactttcaaagtctcttgcaaagtttctaatagtggtgaccaaaaccagttgatcgaagaaatgttcttcttggcttaggaggtctttatggtgttgctaatgctataccattagcagcatcggctactcctataccatcccctgatctcaaaacttgtggtagagccaccatatcggatggtccactagtaccctatacttgttgcccccctcctatgccaactaactttgacaccattccatattacaagttcccttctatgactaaactccgtatccgtcccctgctcatgctgttgatgaggagtatattgctaagtataatttggccataagtcgaatgaaagatcttgataagacagaccctttaaaccctctt

SEQ ID NO: 1801 - DNA, 507 bp, Artificial
  Mutation introduced by TALE nuclease pair POT33_T02 within a POT33 allele
caagtgtgtgcaatagtagttctactactacaactctcaaaactcctttcatttcatccaatacttctttaggttccactcctaagcccctctcaacttttcctccatggaaaacgtaacaaaactttcaaagtctcttgcaaagtttctaatagtggtgaccaaaaccaaaacgaattctgttgatcgaagaaatgttcttcttggcttaggaggtctttatggtgttgctaatgctataccattagcagcatcggctactcctataccatcccctgatctcaaaacttgtggtagagccaccatatcggatggtccactagtaccctatacttgttgcccccctcctatgccaactaactttgacaccattccatattacaagttcccttctatgactaaactccgtatccgtcccctgctccatgctgttgatgaggagtatattgctaagtataatttggccataagtcgaatgaaagatcttgataagacagaccctttaaa

SEQ ID NO: 1802 - DNA, 499 bp, Artificial
  Mutation introduced by TALE nuclease pair POT33_T02 within a POT33 allele
caagtgtgtgcaatagtagttctactactacaactctcaaaactcctttcatttcatccaatacttctttaggttccactcctaagcccctctcaacttttcatccatggaaaacgtaacaaaactttcaaagtctcttgcaaagtttctaatagtggtgaccaaaaccaaacgaattctgttgatcgaagaaatgttcttcttggcttaggaggtctttatggtgttgctaatgctataccattagcagcatcggctactcctataccatcccctgatctcaaaacttgtggtagagccaccatatcggatggtccactagtaccctatacttgttgcccccctcctatgccaactaactttgacaccattccatattacaagttcccttctatgactaaactccgtatccgtcccctgctcatgctgttgatgaggagtatattgctaagtataatttggccataagtcgaatgaaagatcttgataagacagaccc

SEQ ID NO: 1803 - DNA, 512 bp, Artificial
  Mutation introduced by TALE nuclease pair POT33_T02 within a POT33 allele
caagtgtgtgcaatagtagttctactactacaactctcaaaactcctttcatttcatccaatacttctttaggttccactcctaagccctctcaacttttcctccatggaaaacgtaacaaaactttcaaagtctcttgcaaagtttctaatagtggtgaccaaaaccaaacgaattctgttgatcgaagaaatgttcttcttggcttaggaggtctttatggtgttgctaatgctataccattagcagcatcggctactcctataccatcccctgatctcaaaacttgtggtagagccaccatatcggatggtccactagtaccctatacttgttgcccccctcctatgccaactaactttgacaccattccatattacaagtttcccttctatgactaaactccgtatccgtcccctgctcatgctgttgatgaggagtatattgctaagtataatttggccataagtcgaatgaaagatcttgataagacagaccctttaaaccctctt

SEQ ID NO: 1804 - DNA, 545 bp, Artificial
  Mutation introduced by TALE nuclease pair POT33_T02 within a POT33 allele
caagtgtgtgcaatagtagttctactactacaactctcaaaactcctttcatttcatccaatacttctttaggttccactcctaagccctctcaacttttcctccatggaaaacgtaacaaaactttcaaagtctcttgcaaagtttctaatagtggtgaccaaacttgcccctgggcggctccaggaagcccgacggcgccaaacgaattctgttgatcgaagaaatgttcttcttggcttaggaggtctttatggtgttgctaatgctataccattagcagcatcggctactcctataccatcccctgatctcaaaacttgtggtagagccaccatatcggatggtccactagtaccctatacttgttgccccctcctatgccaactaacttttgacaccattccatattacaagttcccttctatgactaaactccgtatccgtcccctgctcatgctgttgatgaggagtatattgctaagtataatttggccataagtcgaatgaaagatcttgataagacagaccctttaaaccctctt

SEQ ID NO: 1805 - DNA, 519 bp, Artificial
  Mutation introduced by TALE nuclease pair POT33_T02 within a POT33 allele
caagtgtgtgcaatagtagttctactactacaactctcaaaactcctttcatttcatccaatacttctttaggttccactcctaagcccctctcaacttttcctccatggaaaacgtaacaaaactttcaaagtctcttgcaaagtttctaatagtggtgaccaaaaccaaaacaaacgaattctgttgatcgaagaaatgttcttcttggcttaggaggtctttatggtgttgctaatgctataccattagcagcatcggctactcctataccatcccctgatctcaaaacttgtggtagagccaccatatcggatggtccactagtaccctatacttgttgcccccctcctatgccaactaactttgacaccattccatattacaagcttcccttctatgactaaactccgtatccgtcccctgctcatgctgttgatgaggagtatattgctaagtataatttggccataagtcgaatgaaagatcttgataagacagacccttttaaaccctctt

SEQ ID NO: 1806 - DNA, 514 bp, Artificial
  Mutation introduced by TALE nuclease pair POT33_T02 within a POT33 allele
caagtgtgtgcaatagtagttctactactacaactctcaaaactcctttcatttcatccaatacttctttaggttccactcctaagcccctctcaacttttcctccatggaaaacgtaacaaaactttcaaagtctcttgcaaagtttctaatagtggtgaccaaaaccaaaaacgaattctgttgatcgaagaaatgttcttcttggcttaggaggtctttatggtgttgctaatgctataccattagcagcatcggctactcctataccatcccctgatctcaaaacttgtggtagagccaccatatcggatggtccactagtaccctatacttgttgcccccctcctcatgccaactaactttgacaccattccatattcacaagttcccttctatgactaaactccgtatccgtcccctgctcatgctgttgatgaggagtatattgctaagtataatttggccataagtcgaatgaaagatcttgataagacagaccctttaaaccctc

SEQ ID NO: 1807 - DNA, 513 bp, Artificial
  Mutation introduced by TALE nuclease pair POT33_T02 within a POT33 allele
caagtgtgtgcaatagtagttctactactacaactctcaaaactcctttcatttcatccaatacttctttaggttccactcctaagcccctctcaacttttcctccatggaaaacgtaacaaaactttcaaagtctcttgcaaagtttctaatagtggtgaccaaaaccaaaacgaattctgttgatcgaagaaatgttcttcttggcttaggaggtctttatggtgttgctaatgctataccattagcagcatcggctactcctataccatcccctgatctcaaaacttgtggtagagccaccatatcggatggtccactagtaccctatacttgttgcccccctcctatgccaactaactttgacaccattccatattacaagttcccttctatgactaaactccgtatccgtcccctgctcatgctgttgatgaggagtatattgctaagtataatttggctataagtcgaatgaaagatcttgataagacagaccctttaaaccctctt

SEQ ID NO: 1808 - DNA, 468 bp, Artificial
  Mutation introduced by TALE nuclease pair POT33_T02 within a POT33 allele
  misc_feature (426): n is a or c or t or g
caagtgtgtgcaatagtagttctactactacaactctcaaaactcctttcatttcatccaatacttctttaggttccactcctaagcccctctcaactttttcctccatggaaaacgtaacaaaactttcaaagtctcttgcaaagtttctaatagtggtgaccaaaaccaactgaattctgttgatcgaagaaatgttcttcttggcttaggaggtctttatggtgttgctaatgctataccattagcagcatcggctactcctataccatcccctgatctcaaaacttgtggtagagccaccatatcggatggtccactagtaccctatacttgttgcccccctcctatgccaactaactttgacaccattccatattacaaggttcccttctatgactaaactccgtatccgtccccctgctnatgctgttgatgaggagtatattgctaagtataatttggcca

SEQ ID NO: 1809 - DNA, 484 bp, Artificial
  Mutation introduced by TALE nuclease pair POT33_T02 within a POT33 allele
caagtgtgtgcaatagtagttctactactacaactctcaaaactcctttcatttcatccaatacttctttaggttccactcctaagcccctctcaacttttcctccatggaaaacgtaacaaaactttcaaagtctcttgcaaagtttctaatagtggtgaccaaaaccaaaacgaattctgttgatcgaagaaatgttcttcttggcttaggaggtctttatggtgttgctaatgctataccattagcagcatcggctactcctataccatcccctgatctcaaaacttgtggtagagccaccatatcggatggtccactagtaccctatacttgttgcccccctcctatgccaactaactttgacaccacttccattattcacaagttcccattccttatgactaaactccagtatccgtcccctgctccatgctgttgatgaggagtatagttgctaagtataatttggccataagtcgaa

SEQ ID NO: 1810 - DNA, 513 bp, Artificial
  Mutation introduced by TALE nuclease pair POT33_T02 within a POT33 allele
aagtgtgtgcaatagtagttctactactacaactctcaaaactcctttcatttcatccaatacttctttaggttccactcctaagcccctctcaacttttcctccatggaaaacgtaacaaaactttcaaagtctcttgcaaagtttctaatagtggtgaccaaaaccaaaaacgaattctgttgatcgaagaaatgttcttcttggcttaggaggtctttatggtgttgctaatgctataccattagcagcatcggctactcctataccatcccctgatctcaaaacttgtggtagagccaccatatcggatggtccactagtaccctatacttgttgcccccctcctatgccaactaactttgacaccattccatattacaagttcccttctatgactaaactccgtatccgtcccctgctcatgctgttgatgaggagtatattgctaagtataatttggccataagtcgaatgaaagatcttgataagacagaccctttaaaccctctt

SEQ ID NO: 1811 - DNA, 515 bp, Artificial
  Mutation introduced by TALE nuclease pair POT33_T02 within a POT33 allele
caagtgtgtgcaatagtagttctactactacaactctcaaaactcctttcatttcatccaatacttctttaggttccactcctaagccctctcaacttttcctccatggaaaacgtaacaaaactttcaaagtctcttgcaaagtttctaatagtggtgaccaaaaccaatgaaacgaattctgttgatcgaagaaatgttcttcttggcttaggaggtctttatggtgttgctaatgctataccattagcagcatcggctactcctataccatcccctgatctcaaaacttgtggtagagccaccatatcggatggtccactagtaccctatacttgttgcccccctcctatgccaactaactttgacaccattccatattacaagttcccttctatgactaaactccgtatccgtcccctgctcatgctgttgatgaggagtatattgctaagtataatttggccataagtcgaatgaaagatcttgataagacagaccctttaaaccctctt

SEQ ID NO: 1812 - DNA, 509 bp, Artificial
  Mutation introduced by TALE nuclease pair POT33_T02 within a POT33 allele
caagtgtgtgcaatagtagttctactactacaactctcaaaactcctttcatttcatccaatacttctttaggttccactcctaagcccctctcaacttttcctccatggaaaacgtaacaaaactttcaaagtctcttgcaaagtttctaatagtggtgaccaaactacgaattctgttgatcgaagaaatgttcttcttggcttaggaggtctttatggtgttgctaatgctataccattagcagcatcggctactcctataccatcccctgatctcaaaacttgtggtagagccaccatatcggatggtccactagtaccctatacttgttgcccccctcctatgccaactaactttgacaccattccatattacaagttcccttctatgactaaactccgtatccgtcccctgctcatgctgttgatgaggagtatattgctaagtataatttggccataagtcgaatgaaagatcttgataagacagaccctttaaaccctctt

SEQ ID NO: 1813 - DNA, 513 bp, Artificial
  Mutation introduced by TALE nuclease pair POT33_T02 within a POT33 allele
caagtgtgtgcaatagtagttctactactacaactctcaaaactcctttcatttcatccaatacttctttaggttccactcctaagcccctctcaacttttcctccatggaaaacgtaacaaaactttcaaagtctcttgcaaagtttctaatagtggtgaccaaaatcaaaacgaattctgttgatcgaagaaatgttcttcttggcttaggaggtctttatggtgttgctaatgctataccattagcagcatcggctactcctataccatcccctgatctcaaaacttgtggtagagccaccatatcggatggtccactagtaccctatacttgttgcccccctcctatgccaactaactttgacaccattccatattacaagttcccttctatgactaaactccgtatccgtcccctgctcatgctgttgatgaggagtatattgctaagtataatttggccataagtcgaatgaaagatcttgataagacagaccctttaaaccctctt

SEQ ID NO: 1814 - DNA, 514 bp, Artificial
  Mutation introduced by TALE nuclease pair POT33_T02 within a POT33 allele
  misc_feature (425): n is a or c or t or g
caagtgtgtgcaatagtagttctactactacaactctcaaaactcctttcatttcatccaatacttctttaggttccactcctaagccctctcaacttttcctccatggaaaacgtaacaaaactttcaaagtctcttgcaaagtttctaatagtggtgaccaaaaccaaaaatcgaattctgttgatcgaagaaatgttcttcttggcttaggaggtctttatggtgttgctaatgctataccattagcagcatcggctactcctataccatcccctgatctcaaaacttgtggtagagccaccatatcggatggtccactagtaccctatacttgttgcccccctcctatgccaactaactttgacaccattccatattacaagttcccttctatgactaaactccgtatccgtcccctgctnatgctgttgatgaggagtatattgctaagtataatttggccataagtcgaatgaaagatcttgataagacagaccctttaaaccctctt

SEQ ID NO: 1815 - DNA, 452 bp, Artificial
  Mutation introduced by TALE nuclease pair POT33_T02 within a POT33 allele
caagtgtgtgcaatagtagttctactactacaactctcaaaactcctttcatttcatccaatacttctttaggttccactcctaagcccctctcaacctttactccatggaaaacgtaacaaaactttcaaagtctcttgcaaagtttctaatagtggtgaccaaaaccaattctgttgatcgaagaaatgttcttcttggcttaggaggtctttatggtgttgctaatgctataccattagcagcatcggctactcctataccatcccctgatctcaaaacttgtggtagagccaccatatcggatggtccactagtaccctatacttgttgcccccctcctatgccaactaactttgacaccattccatattacaagttcccttctatgactaaactccgtatccgtcccctgctcatgctgttgatgaggagtatattgctaagtataa

SEQ ID NO: 1816 - DNA, 513 bp, Artificial
  Mutation introduced by TALE nuclease pair POT33_T02 within a POT33 allele
caagtttgtgcaatagtagttctactactacaactctcaaaactcctttcatttcatccaatacttctttaggttccactcctaagcccctctcaacttttcctccatggaaaacgtaacaaaactttcaaagtctcttgcaaagtttctaatagtggtgaccaaaaccaaaacgaattctgttgatcgaagaaatgttcttcttggcttaggaggtctttatggtgttgctaatgctataccattagcagcatcggctactcctataccatcccctgatctcaaaacttgtggtagagccaccatatcggatggtccactagtaccctatacttgttgcccccctcctatgccaactaactttgacaccattccatattacaagttcccttctatgactaaactccgtatccgtcccctgctcatgctgttgatgaggagtatattgctaagtataatttggccataagtcgaatgaaagatcttgataagacagaccctttaaaccctctt

SEQ ID NO: 1817 - DNA, 502 bp, Artificial
  Mutation introduced by TALE nuclease pair POT33_T02 within a POT33 allele
caagtgtgtgcaatagtagttctactactacaactctcaaaactcctttcatttcatccaatacttctttaggttccactcctaagcccctctcaacttttcctccatggaaaacgtaacaaaactttcaaagtctcttgcaaagtttctaatagtggtgaccaaaaccaaacaacgaattctgttgatcgaagaaatgttcttcttggcttaggaggtctttatggtgttgctaatgctataccattagcagcatcggctactcctataccatcccctgatctcaaaacttgtggtagagccaccatatcggatggtccactagtaccctatacttgttgcccccctcctatgccaactaactttgacaccattccatattacaagttcccttctatgactaaactccgtatccgtcccctgctcatgctgttgatgaggagtatattgctaagtataatttggccataagtcgaatgaaagatcttgataagacagaccc

SEQ ID NO: 1818 - DNA, 512 bp, Artificial
  Mutation introduced by TALE nuclease pair POT33_T02 within a POT33 allele
caagtgtgtgcaatagtagttctactactacaactctcaaaactcctttcatttcatccaatacttctttaggttccactcctaagcccctctcaacttttcctccatggaaaacgtaacaaaactttcaaagtctcttgcaaagtttctaatagtggtgaccaaaaccaaaacgaattctgttgatcgaagaaatgttcttcttggcttaggaggtctttatggtgttgctaatgctataccattagcagcatcggctactcctataccatcactgatctcaaaacttgtggtagagccaccatatcggatggtccactagtaccctatacttgttgcccccctcctatgccaactaactttgacaccattccatattacaagttcccttctatgactaaactccgtatccgtcccctgctcatgctgttgatgaggagtatattgctaagtataatttggccataagtcgaatgaaagatcttgataagacagaccctttaaaccctctt

SEQ ID NO: 1819 - DNA, 514 bp, Artificial
  Mutation introduced by TALE nuclease pair POT33_T02 within a POT33 allele
caagtgtgtgcaatagtagttctactactacaactctcaaaactcctttcattccatccaatacttctttaggttccactcctaagccctctcaacttttcctccatggaaaacgtaacaaaactttcaaagtctcttgcaaagtttctaatagtggtgaccaaaaccaaaaaacgaattctgttgatcgaagaaatgttcttcttggcttaggaggtctttatggtgttgctaatgctataccattagcagcatcggctactcctataccatcccctgatctcaaaacttgtggtagagccaccatatcggatggtccactagtaccctatacttgttgcccccctcctatgccaactaactttgacaccattccatattacaagttcccttctatgactaaactccgtatccgtcccctgctcatgctgttgatgaggagtatattgctaagtataatttggccataagtcgaatgaaagatcttgataagacagaccctttaaaccctctt

SEQ ID NO: 1820 - DNA, 528 bp, Artificial
  Mutation introduced by TALE nuclease pair POT33_T02 within a POT33 allele
caagtgtgtgcaatagtagttctactactacaactctcaaaaactcctttcatttcatccaatacttctttaggttccactcctaagcccctctcaacttttcctccatggaaaacgtaacaaaactttcaaagtctcttgcaaagtttctaatagtggtgaccaaacttgcccctgggcggctccaggaagcccgacggcgccaaacgaatttctgttgatcgaagaaatgttcttcttggcttaggaggtctttatggtgttgctaatgctataccattagcagcatcggctactcctataccatcccctgatctcaaaacttgtggctagagccaccatatcggatggtccactagtaccctatacttgttgccccctcctatgccaactaactttgacaccattccatattacaagttcccttctatgactaaactccgtatccgtcccctgctcatgctgttgatgaggagtatattgctaagtataatttggccataagtcgaatgaaagatcttgataaga

SEQ ID NO: 1821 - DNA, 501 bp, Artificial
  Mutation introduced by TALE nuclease pair POT33_T02 within a POT33 allele
caagtgtgtgcaatagtagttctactactacaactctcaaaactcctttcatttcatccaatacttctttaggttccactcctaagcccctctcaacttttcctccatggaaaacgtaacaaaactttcaaagtctcttgcaaagtttctaatagtggtgaccaaaaccaaaaacgaattctgttgatcgaagaaatgttcttcttggcttaggaggtctttatggtgttgctaatgctataccattagcagcatcggctactcctataccatcccctgatctcaaaacttgtggtagagccaccatatcggatggtccactagtaccctatacttgttgcccccctcctatgccaactaactttgacaccattccatattacaagttcccttctatgactaaactccgtatccgtcccctgctcatgctgttgatgaggagtatattgctaagtataatttggccataagtcgaatgaaagatcttgataagacagaccc

SEQ ID NO: 1822 - DNA, 504 bp, Artificial
  Mutation introduced by TALE nuclease pair POT33_T02 within a POT33 allele
caagtgtgtgcaatagtagttctactactacaactctcaaaactcctttcattccatccaatacttctttaggttccactcctaagcccctctcaacttttcctccatggaaaacgtaacaaaactttcaaagtctcttgcaaagtttctaatagtggtgaccaaaaccaaaaacgaattctgttgatcgaagaaatgttcttcttggcttaggaggtctttatggtgttgctaatgctataccattagcagcatcggctactcctataccatcccctgatctcaaaacttgtggtagagccaccatatcggatggtccactagtaccctatacttgttgcccccctcctatgccaactaactttgacaccattccatattacaagttcccttctatgactaaactccgtatccgtcccctgctcatgctgttgatgaggagtatattgctaagtatcaatttggccataagtcgaatgaaagatcttgataagcagacccttt

SEQ ID NO: 1823 - DNA, 506 bp, Artificial
  Mutation introduced by TALE nuclease pair POT33_T02 within a POT33 allele
caagtgtgtgcaatagtagttctactactacaactctcaaaactcctttcatttcatccaatacttctttaggttccactcctaagcccctctcaacttttcctccatggaaaacgtaacaaaactttcaaagtctcttgcaaagtttctaatagtggtgaccaaaaccaactgttgatcgaagaaatgttcttcttggcttaggaggtctttatggtgttgctaatgctataccattagcagcatcggctactcctataccatcccctgatctcaaaacttgtggtagagccaccatatcggatggtccactagtaccctatacttgttgcccccctcctatgccaactaactttgacaccattccatattacaagttcccttctatgactaaactccgtatccgtcccctgctccatgctgttgatgaggagtatattgctaagtataatttggccataagtcgaatgaaagatcttgataagacagaccctttaaaccctctt

SEQ ID NO: 1824 - DNA, 517 bp, Artificial
  Mutation introduced by TALE nuclease pair POT33_T02 within a POT33 allele
caagtgtgtgcaatagtagttctactactacaactctcaaaactcctttcatttcatccaatacttctttaggttccactcctaagcccctctcaacttttcctccatggaaaacgtaacaaaactttcaaagtctcttgcaaagtttctaatagtggtgaccaaaaccaaaacaaacgaattctgttgatcgaagaaatgttcttcttggcttaggaggtctttatggtgttgctaatgctataccattagcagcatcggctactcctataccatcccctgatctcaaaacttgtggtagagccaccatatcggatggtccactagtaccctatacttgttgcccccctcctatgccaactaactttgacaccattccatattacaagttcccttctatgactaaactccgtatccgtcccctgctcatgctgttgatgaggagtatattgctaagtataatttggccataagtcgaatgaaagatcttgataagacagaccctttaaaccctctt

SEQ ID NO: 1825 - DNA, 406 bp, Artificial
  Mutation introduced by TALE nuclease pair POT33_T02 within a POT33 allele
caagtgtgtgcaatagtagttctactactacaactctcaaaaactcctttcatttcacccaattctgttgatcgaagaaatgttcttcttggcttaggaggtctttatggtgttgctaatgctataccattagcagcatcggctactcctataccatcccctgatctcaaaacttgtggtagagccaccatatcggatggtccactagtaccctatacttgttgccccccatcctatgccaactaactttgacaccattccatattacaagttcccttctatgactaaatctccgtatccgtcccccatgctcatgctgttgatgaggagtatatttgctaagtataatttgggccataagtcgaatgaaagatcttgataagacagaccctttaaaccctcttgg

SEQ ID NO: 1826 - DNA, 472 bp, Artificial
  Mutation introduced by TALE nuclease pair POT33_T02 within a POT33 allele
caagtgtgtgcaatagtagttctactactacaactctcaaaactcctttcatttcatccaatacttctttaggttccactcctaagccctctcaacttttcctccatggaaaacgtaacaaaactttcaaagtctcttgcaaagtttctaatagtggtgaccaaaaccaaaaacgaattctgttgatcgaagaaatgttcttcttggcttaggaggtctttatggtgttgctaatgctataccattagcagcatcggctactcctataccatcccctgatctcaaaacttgtggtagagccaccatatcggatggtccactagtaccctatacttgttgcccccctcctcatgccaactaactttgacaccacttccattattcacaagttcccattccttatgactaaatctccagtactccgtcccctgctccatgctgttgatgatggagtatagttgctaatgtataa

SEQ ID NO: 1827 - DNA, 516 bp, Artificial
  Mutation introduced by TALE nuclease pair POT33_T02 within a POT33 allele
caagtgtgtgcaatagtagttctactactacaactctcaaaactcctttcatttcatccaatacttctttaggttccactcctaagcccctctcaacttttcctccatggaaaacgtaacaaaactttcaaagtctcttgcaaagtttctaatagtggtgaccaaaaccaaaaaatcgaattctgttgatcgaagaaatgttcttcttggcttaggaggtctttatggtgttgctaatgctataccattagcagcatcggctactcctataccatcccctgatctcaaaacttgtggtagagccactatatcggatggtccactagtaccctatacttgttgcccccctcctatgccaactaactttgacaccattccatattacaagttcccttctatgactaaactccgtatccgtcccctgctcatgctgttgatgaggagtatattgctaagtataatttggccataagtcgaatgaaagatcttgataagacagaccctttaaaccctctt

SEQ ID NO: 1828 - DNA, 511 bp, Artificial
  Mutation introduced by TALE nuclease pair POT33_T02 within a POT33 allele
caagtgtgtgcaatagtagttctactactacaactctcaaaactcctttcatttcatccaatacttctttaggttccactcctaagcccctctcaacttttcctccatggaaaacgtaacaaaactttcaaagtctcttgcaaagtttctaatagtggtgaccaaaaccaaattctgacattgatcgaagaaatgttcttcttggcttaggaggtctttatggtgttgctaatgctataccattagcagcatcggctactcctataccatcccctgatctcaaaacttgtggtagagccaccatatcggatggtccactagtaccctatacttgttgcccccctcctatgccaactaactttgacaccattccatattacaagttcccttctatgactaaactccgtatccgtcccctgctcatgctgttgatgaggagtatattgctaagtataatttggccataagtcgaatgaaagatcttgataagacagaccctttaaaccctctt

SEQ ID NO: 1829 - DNA, 518 bp, Artificial
  Mutation introduced by TALE nuclease pair POT33_T02 within a POT33 allele
caagtgtgtgcaatagtagttctactactacaactctcaaaactcctttcatttcatccaatacttctttaggttccactcctaagccctctcaacttttcctccatggaaaacgtaacaaaactttcaaagtctcttgcaaagtttctaatagtggtgaccaaaaccaaaacaatcgaaaattctgttgatcgaagaaatgttcttcttggcttaggaggtctttatggtgttgctaatgctataccattagcagcatcggctactcctataccatcccctgatctcaaaacttgtggtagagccaccatatcggatggtccactagtaccctatacttgttgcccccctcctatgccaactaactttgacaccattccatattacaagttcccttctatgactaaactccgtatccgtcccctgctcatgctgttgatgaggagtatattgctaagtataatttggccataagtcgaatgaaagatcttgataagacagaccctttaaaccctctt

SEQ ID NO: 1830 - DNA, 512 bp, Artificial
  Mutation introduced by TALE nuclease pair POT33_T02 within a POT33 allele
caagtgtgtgcaatagtagtctactactacaactctcaaaactcctttcatttcatccaatacttctttaggttccactcctaagccctctcaacttttcctccatggaaaacgtaacaaaactttcaaagtctcttgcaaagtttctaatagtggtgaccaaaaccaaacgaattctgttgatcgaagaaatgttcttcttggcttaggaggtctttatggtgttgctaatgctataccattagcagcatcggctactcctataccatcccctgatctcaaaacttgtggtagagccaccatatcggatggtccactagtaccctatacttgttgcccccctcctatgccaactaactttgacaccattccatattacaagcttcccttctatgactaaactccgtatccgtcccctgctcatgctgttgatgaggagtatattgctaagtatcaatttggccataagtcgaatgaaagatcttgataagacagaccctttaaaccctctt

SEQ ID NO: 1831 - DNA, 516 bp, Artificial
  Mutation introduced by TALE nuclease pair POT33_T02 within a POT33 allele
caagtgtgtgcaatagtagttctactactacaactctcaaaactcctttcatttcatccaatacttctttaggttccactcctaagcccctctcaacttttcctccatggaaaacgtaacaaaactttcaaagtctcttgcaaagtttctaatagtggtgaccaaaaccaaaactgaaattctgttgatcgaagaaatgttcttcttggcttaggaggtctttatgggtgttgctaatgctataccattagcagcatcggctactcctataccatcccctgatctcaaaacttgtggtagagccaccatatcggatggtccactagtaccctatacttgttgcccccctcctatgccaactaactttgacaccattccatattacaagttcccttctatgactaaactccgtatccgtcccctgctcatgctgttgatgaggagtatattgctaagtataatttggccataagtcgaatgaaagatcttgataagacagaccctttaaaccctctt

SEQ ID NO: 1832 - DNA, 514 bp, Artificial
  Mutation introduced by TALE nuclease pair POT33_T02 within a POT33 allele
caagtgtgtgcaatagtagttctactactacaactctcaaaactcctttcatttcatccaatacttctttaggttccactcctaagcccctctcaacttttcctccatggaaaacgtaacaaaactttcaaagtctcttgcaaagtttctaatagtggtgaccaaaatcaaaacgaattctgttgatcgaagaaatgttcttcttggcttaggaggtctttatggtgttgctaatgctataccattagcagcatcggctactcctataccatcccctgatctcaaaacttgtggtagagccaccatatcggatggtccactagtaccctatacttgttgcccccctcctatgccaactaactttgacaccattccatattacaagttccccttctatgactaaactccgtatccgtcccctgctcatgctgttgatgaggagtatattgctaagtataatttggccataagtcgaatgaaagatcttgataagacagaccctttaaaccctctt

SEQ ID NO: 1833 - DNA, 469 bp, Artificial
  Mutation introduced by TALE nuclease pair POT33_T02 within a POT33 allele
caagtgtgtgcaatagtagttctactactacaactctcaaaactcctttcatttcatccaatacttctttaggttccactcctaagccctctcaacttttcctccatggaaaacgtaacaaaactttcaaagtctcttgcaaagtttctaatagtggtgactgttcttcttggcttaggaggtctttatggtgttgctaatgctataccattagcagcatcggctactcctataccatcccctgatctcaaaacttgtggtagagccaccatatcggatggtccactagtaccctatacttgttgcccccctcctatgccaactaactttgacaccattccatattacaagttcccttctatgactaaactccgttccgtcccctcgctccatgctgttgatgagggagtatattgcttaagtataatttggccataagtcgaatgaaagatcttgataagacagaccc

SEQ ID NO: 1834 - DNA, 496 bp, Artificial
  Mutation introduced by TALE nuclease pair POT33_T02 within a POT33 allele
caagtgtgtgcaatagtagttctactactacaactctcaaaactcctttcatttcatccaatacttctttaggttccactcctaagcccctctcaacttttcctccatggaaaacgtaacaaaactttcaaagtctcttgcaaagtttctaatagtggtgaccaaaaccaaaactctgttgatcgaagaaatgttcttcttggcttaggaggtctttatggtgttgctaatgctataccattagcagcatcggctactcctataccatcccctgatctcaaaacttgtggtagagccaccatatcggatggtccactagtaccctatacttgttgcccccctcctatgccaactaactttgacaccattccatattacaagttcccttctatgactaaactccgtatccgtcccctgctcatgctgttgatgaggagtatattgctaagtataatttggccataagtcgaatgaaagatcttgataagacagaccc

SEQ ID NO: 1835 - DNA, 510 bp, Artificial
  Mutation introduced by TALE nuclease pair POT33_T02 within a POT33 allele
caagtgtgtgcaatagtagttctactactacaactctcaaaactcctttcatttcatccaatacttctttaggttccactcctaagcccctctcaacttttcctccatggaaaacgtaacaaaactttcaaagtctcttgcaaagtttctaatagtggtgaccaaaaccaaaacgaattctgttgatcgaagaaatgttcttcttggcttaggaggtctttatggtgttgctaatgctataccattagcagcatcggctactcctataccatcccctgatctcaaaacttgtggtagagccaccatatcggatggtccactagtaccctatacttgttgcccacctcctatgccaactaacttttgacaccattccatattacaagttcccttctatgactaaactccgtatccgtcccctgctcatgctgttgatgaggagtatattgctaagtataatttggccataagtcgaatgaaagatcttgataagacagaccctttaaaccc

SEQ ID NO: 1836 - DNA, 501 bp, Artificial
  Mutation introduced by TALE nuclease pair POT33_T02 within a POT33 allele
caagtgtgtgcaatagtagttctactactacaactctcaaaactcctttcatttcatccaatacttctttaggttccactcctaagcccctctcaacttttcctccatggaaaacgtaacaaaactttcaaagtctcttgcaaagtttctaatagtggtgacgaattctgttgatcgaagaaatgttcttcttggcttaggaggtctttatggtgttgctaatgctataccattagcagcatcggctactcctataccatcccctgatctcaaaacttgtggtagagccaccatatcggatggtccactagtaccctatacttgttgcccccctcctatgccaactaactttgacaccattccatattacaagttcccttctatgactaaactccgtatccgtcccctgctcatgctgttgatgaggagtatattgctaagtataatttggccataagtcgaatgaaagatcttgataagacagaccctttaaaccctctt

SEQ ID NO: 1837 - DNA, 514 bp, Artificial
  Mutation introduced by TALE nuclease pair POT33_T02 within a POT33 allele
caagtgtgtgcaatagtagttctactactacaactctcaaaactcctttcatttcatccaatacttctttaggttccactcctaagcccctctcaacttttcctccatggaaaacgtaacaaaactttcaaagtctcttgcaaagtttctaatagtggtgaccaaaaccaaaacaattctgttgatcgaagaaatgttcttcttggcttaggaggtctttatggtgttgctaatgctataccattagcagcatcggctactcctataccatcccctgatctcaaaacttgtggtagagccaccatatcggatggtccactagtaccctatacttgttgcccccctcctatgccaactaacttttgacaccattccatattacaagttcccttctatgactaaactccgtatccgtccccctgctcatgctgttgatgaggagtatattgctaagtataatttggccataagtcgaatgaaagatcttgataagacagaccctttaaaccctctt

SEQ ID NO: 1838 - DNA, 514 bp, Artificial
  Mutation introduced by TALE nuclease pair POT33_T02 within a POT33 allele
caagtgtgtgcaatagtagttctactactacaactctcaaaactcctttcatttcatccaatacttctttaggttccactcctaagcccctctcaacttttcctccatggaaaacgtaacaaaactttcaaagtctcttgcaaagtttctaatagtggtgaccaaaacaaatgaaacattctgttgatcgaagaaatgttcttcttggcttaggaggtctttatggtgttgctaatgctataccattagcagcatcggctactcctataccatcccctgatctcaaaacttgtggtagagccaccatatcggatggtccactagtaccctatacttgttgcccccctcctatgccaactaactttgacaccattccatattacaagttcccttctatgactaaactccgtatccgtcccctgctcatgctgttgatgaggagtatattgctaagtataatttggccataagtcgaatgaaagatcttgataagacagaccctttaaaccctctt

SEQ ID NO: 1839 - DNA, 498 bp, Artificial
  Mutation introduced by TALE nuclease pair POT33_T02 within a POT33 allele
caagtgtgtgcaatagtagttctactactacaactctcaaaactcctttcatttcatccaatacttctttaggttccactcctaagccctctcaacttttcctccatggaaaacgtaacaaaactttcaaagtctcttgcaaagtttctaatagtggtgaccaaaaccaattgaattctgttgatcgaagaaatgttcttcttggcttaggaggtctttatggtgttgctaatgctataccattagcagcatcggctactcctataccatcccctgatctcaaaacttgtggtagagccaccatatcggatggtccactagtaccctatacttgttgcccccctcctatgccaactaactttgtacaccattccatattcacaagttcccttcctatgactaaactccagtatccgtcccctgctccatgctgttgatgaggagtatattgctaagtataattttggccataagtcgaatgaaagatcttgataagac

SEQ ID NO: 1840 - DNA, 514 bp, Artificial
  Mutation introduced by TALE nuclease pair POT33_T02 within a POT33 allele
caagtgtgtgcaatagtagttctactactacaactctcaaaactcctttcatttcatccaatacttctttaggttccactcctaagccctctcaacttttcctccatggaaaacgtaacaaaactttcaaagtctcttgcaaagtttctaatagtggtgaccaaaaccaaaaaacgaattctgttgatcgaagaaatgttcttcttggcttaggaggtctttatggtgttgctaatgctataccattagcagcatcggctactcctataccatcccctgatctcaaaacttgtggtagagccactatatcggatggtccactagtaccctatacttgttgcccccctcctatgccaactaactttgacaccattccatattacaagttcccttctatgactaaactccgtatccgtcccctgctcatgctgttgatgaggagtatattgctaagtataatttggccataagtcgaatgaaagatcttgataagacagaccctttaaaccctctt

SEQ ID NO: 1841 - DNA, 500 bp, Artificial
  Mutation introduced by TALE nuclease pair POT33_T02 within a POT33 allele
caagtgtgtgcaatagtagttctactactacaactctcaaaactcctttcatttcatccaatacttctttaggttccactcctaagcccctttcaacttttcctccatggaaaacgtaacaaaactttcaaagtctcttgcaaagtttctaatagtggtgaccaaaaccaaaacgaattctgttgatcgaagaaatgttcttcttggcttaggaggtctttatggtgttgctaatgctataccattagcagcatcggctactcctataccatcccctgatctcaaaacttgtggtagagccaccatatcggatggtccactagtaccctatacttgttgcccccctcctatgccaactaactttgacaccattccatattacaagttcccttctatgactaaactccgtatccgtcccctgctcatgctgttgatgaggagtatattgctaagtataatttggccataagtcgaatgaaagatcttgataagacagaccc

SEQ ID NO: 1842 - DNA, 515 bp, Artificial
  Mutation introduced by TALE nuclease pair POT33_T02 within a POT33 allele
caagtgtgtgcaatagtagttctactactacaactctcaaaactcctttcatttcatccaatacttctttaggttccactcctaagcccctctcaacttttcctccatggaaaacgtaacaaaactttcaaagtctcttgcaaagtttctaatagtggtgcaaccaaaaccaaaacgaattctgttgatcgaagaaatgttcttcttggcttaggaggtctttatggtgttgctaatgctataccattagcagcatcggctactcctataccatcccctgatctcaaaacttgtggtagagccaccatatcggatggtccactagtaccctatacttgttgcccccctcctatgccaactaactttgacaccattccatattacaagttcccttctatgactaaactccgtatccgtcccctgctcatgctgttgatgaggagtatattgctaagtataatttggccataagtcgaatgaaagatcttgataagacagaccctttaaaccctctt

SEQ ID NO: 1843 - DNA, 495 bp, Artificial
  Mutation introduced by TALE nuclease pair POT33_T02 within a POT33 allele
caagtgtgtgcaatagtagttctactactacaactctcaaaactcctttcatttcatccaatacttctttaggttccactcctaagccctctcaacttttcctccatggaaaacgtaacaaaactttcaaagtctcattgcaaagtttctaatagtggtgaaccaaaacgaattctgttgatcgaagaaatgttcttcttggcttaggaggtctttatggtgttgctaatgctataccattagcagcatcggctactcctataccatcccctgatctcaaaacttgtggtagagccaccatatcggatggtccactagtaccctatacttgttgcccccctcctatgccaactaacttttgacaccattccatatttacaagttcccttctatgactaaactccgtatccgtccccctgctcatgctgttgatgaggagtatattgctaagtataatttggccataagtcgaatgaaagatcttgataagacaga

SEQ ID NO: 1844 - DNA, 544 bp, Artificial
  Mutation introduced by TALE nuclease pair POT33_T02 within a POT33 allele
caagtgtgtgcaatagtagttctactactacaactctcaaaactcctttcatttcatccaatacttctttaggttccactcctaagcccctctcaacttttcctccatggaaaacgtaacaaaactttcaaagtctcttgcaaagtttctaatagtggtgaccaaacttgcccctgggcggctccaggaagcccgacggcgccaaacgaattctgttgatcgaagaatgttcttcttggcttaggaggtctttatggtgttgctaatgctataccattagcagcatcggctactcctataccatcccctgatctcaaaacttgtggtagagccaccatatcggatggtccactagtacctatacttgttgccccctcctatgccaactaactttgacaccattccatattacaagttccctttctatgactaaactccgtatccgtcccctgctcatgctgttgatgaggagtatattgctaagtataatttggccataagtcgaatgaaagatcttgataagacagaccctttaaaccctctt

SEQ ID NO: 1845 - DNA, 491 bp, Artificial
  Mutation introduced by TALE nuclease pair POT33_T02 within a POT33 allele
caagtgtgtgcaatagtagttctactactacaactctcaaaactcctttcatttcatccaatacttctttaggttccactcctaagccctctcaacttttcctccatggaaaacgtaacaaaactttcaaagtctcttgcaaagtttctaatagtggtgaccaacgaattctgttgatcgaagaaatgttcttcttggcttaggaggtctttatggtgttgctaatgctataccattagcagcatcggctactcctataccatcccctgatctcaaaacttgtggtagagccaccatatcggatggtccactagtaccctatacttgttgcccccctcctatgccaactaactttgacaccattccatattacaagttcccttctatgactaaactccgtatccgtcccctgctcatgctgttgatgaggagtatattgctaagtataatttggccataagtcgaatgaaagatcttgataagacagaccc

SEQ ID NO: 1846 - DNA, 513 bp, Artificial
  Mutation introduced by TALE nuclease pair POT33_T02 within a POT33 allele
caagtgtgtgcaatagtagttctactactacaactctcaaaactcctttcatttcatccaatacttctttaggttccactcctaagccctctcaacttttcctccatggaaaacgtaacaaaactttcaaagtctcttgcaaagtttctaatagtggtgaccaaaaccaaaactgaattctgttgatcgaagaaatgttcttcttggcttaggaggtctttatggtgttgctaatgctataccattagcagcatcggctactcctataccatcccctgatctcaaaacttgtggtagagccaccatatcggatggtccactagtaccctatacttgttgcccccctcctatgccaactaactttgacaccattccatattacaagttcccttctatgactaaactccgtatccgtcccctgctcatgctgttgatgaggagtatattgctaagtataatttggccataagtcgaatgaaagatcttgataagacagaccctttaaaccctctt

SEQ ID NO: 1847 - DNA, 506 bp, Artificial
  Mutation introduced by TALE nuclease pair POT33_T02 within a POT33 allele
caagtgtgtgcaatagtagttctactactacaactctcaaaactcctttcatttcatccaatacttctttaggttccactcctaagccctctcaacctttactccatggaaaacgtaacaaaactttcaaagtctcttgcaaagtttctaatagtggtgaccaaaaccaattctgttgatcgaagaaatgttcttcttggcttaggaggtctttatggtgttgctaatgctataccattagcagcatcggctactcctataccatcccctgatctcaaaacttgtggtagagccaccatatcggatggtccactagtaccctatacttgttgcccccctcctatgccaactaactttgacaccattccatattacaagttcccttctatgactaaactccgtatccgtcccctgctcatgctgttgatgaggagtatattgctaagtataatttggccataagtcgaatgaaagatcttgataagacagaccctttaaaccctctt

SEQ ID NO: 1848 - DNA, 518 bp, Artificial
  Mutation introduced by TALE nuclease pair POT33_T02 within a POT33 allele
  misc_feature (493): n is a or c or t or g
caagtgtgtgcaatagtagttctactactacaactctcaaaactcctttcatttcatccaatacttctttaggttccactcctaagccctctcaacttttcctccatggaaaacgtaacaaaactttcaaagtctcttgcaaagtttctaatagtggtgaccaaaaccaaaacaaatcgaaattctgttgatcgaagaaatgttcttcttggcttaggaggtctttatggtgttgctaatgctataccattagcagcatcggctactcctataccatcccctgatctcaaaacttgtggtagagccaccatatcggatggtccactagtaccctatacttgttgcccccctcctatgccaactaactttgacaccattccatattacaagttcccttctatgactaaactccgtatccgtcccctgctcatgctgttgatgaggagtatattgctaagtataatttggccataagtcgaatgaaagatcttgntaagacagaccctttaaaccctctt

SEQ ID NO: 1849 - DNA, 489 bp, Artificial
  Mutation introduced by TALE nuclease pair POT33_T02 within a POT33 allele
caagtgtgtgcaatagtagttctactactacaactctcaaaactcctttcatttcatccaatacttctttaggttccactcctaagccctctcaacttttcctccatggaaaacgtaacaaaactttcaaagtctcttgcaaagtttctaatagtggtgaccgaaattctgttgatcgaagaaatgttcttcttggcttaggaggtctttatggtgttgctaatgctataccattagcagcatcggctactcctataccatcccctgatctcaaaacttgtggtagagccaccatatcggatggtccactagtaccctatacttgttgcccccctcctatgccaactaactttgacaccattccatattacaagttcccttctatgactaaactccgtatccgtcccctgctcatgctgttgatgaggagtatattgctaagtataatttggccataagtcgaatgaaagatcttgataagacagaccc

SEQ ID NO: 1850 - DNA, 502 bp, Artificial
  Mutation introduced by TALE nuclease pair POT33_T02 within a POT33 allele
caagtgtgtgcaatagtagttctactactacaactctcaaaactcctttcatttcatccaatacttctttaggttccactcctaagcccctctcaacttttcctccatggaaaacgtaacaaaactttcaaagtctcttgcaaagtttctaatagtggtgaccaaaaccagttgatcgaagaaatgttcttcttggcttaggaggtctttatggtgttgctaatgctataccattagcagcatcggctactcctataccatcccctgatctcaaaacttgtggtagagccaccatatcggatggtccactagtaccctatacttgttgcccccctcctatgccaactaactttgacaccattccatattacaagttcccttctatgactaaactccgtatccgtcccctgctcatgctgttgatgaggagtatattgctaagtataatttggccataagtcgaatgaaagatcttgataagacagaccctttaaaccctctt

SEQ ID NO: 1851 - DNA, 512 bp, Artificial
  Mutation introduced by TALE nuclease pair POT33_T02 within a POT33 allele
caagtgtgtgcaatagtagttctactactacaactctcaaaactcctttcatttcatccaatacttctttaggttccactcctaagccctctcaacttttcaatccatggaaaacgtaacaaaactttcaaagtctcttgcaaagtttctaatagtggtgaccaaaaccaacgaattctgttgatcgaagaaatgttcttcttggcttaggaggtctttatggtgttgctaatgctataccattagcagcatcggctactcctataccatcccctgatctcaaaacttgtggtagagccaccatatcggatggtccactagtaccctatacttgttgcccccctcctatgccaactaacttttgacaccattccatattacaagttcccttctatgactaaactccgtatccgtcccctgctcatgctgttgatgaggagtatattgctaagtataatttggccataagtcgaatgaaagatcttgataagacagaccctttaaaccctctt

SEQ ID NO: 1852 - DNA, 501 bp, Artificial
  Mutation introduced by TALE nuclease pair POT33_T02 within a POT33 allele
caagtgtgtgcaatagtagttctactactacaactctcaaaactcctttcatttcatccaatacttctttaggttccactcctaagccctctcaacttttcctccatggaaaacgtaacaaaactttcaaagtctcttgcaaagtttctaatagtggtgaccaaaaccaacgaattctgttgatcgaagaaatgttcttcttggcttaggaggtctttatggtgttgctaatgctataccattagcagcatcggctactcctataccatcccctgatctcaaaacttgtggtagagccaccatatcggatggtccactagtaccctatacttgttgcccccctcctatgccaactaactttgacaccattccatattacaagttcccttctatgactaaactccgtatccgtcccctgctcatgctgttgatgaggagtatattgctaagtataatttggccataagtcgaatgaaagatcttgataagacagaccctttt

SEQ ID NO: 1853 - DNA, 527 bp, Artificial
  Mutation introduced by TALE nuclease pair POT33_T02 within a POT33 allele
caagtgtgtgcaatagtagttctactactacaactctcaaaactcctttcatttcatccaatacttctttaggttccactcctaagccctctcaacttttcctccatggaaaacgtaacaaaacatttcaaatgtcatcttgctaagtttcataattagtggatgaagtgccaaaaccaaaaacaatgaaattctgttgatcgaagaaatgttcttcttggcttaggaggtctttatggtgttgctaatgctataccattagcagcatcggctactcctataccatcccctgatctcaaaacttgtggtagagccaccatatcggatggtccactagtaccctatacttgttgcccccctcctatgccaactaactttgacaccattccatattacaagttcccttctatgactaaactccgtatccgtcccctgctcatgctgttgatgaggagtatattgctaagtataatttggccataagtcgaatgaaagatcttgataagacagaccctttaaaccctctt

SEQ ID NO: 1854 - DNA, 473 bp, Artificial
  Mutation introduced by TALE nuclease pair POT33_T02 within a POT33 allele
caagtgtgtgcaatagtagttctactactacaactctcaaaactcctttcatttcatccaatacttctttaggttccactcctaagcccctctcaacttttcctccatggaaaacgtaacaaaactttcaaagtctcttgcaaagtttctaatagtggtgaccaaaaccaacgaattctgttgatcgaagaaatgttcttcttggcttaggaggtctttatggtgttgctaatgctataccattagcagcatcggctactcctataccatcccctgatctcaaaacttgtggtagagccaccatatcggatggtccactagtaccctatacttgttgcccccctcctatgccaactaactttgacaccattccatattacaagttcccttctatgactaaactccgtatccgtcccctgctcatgctgttgatgaggagtatattgctaagtataatttggccataagtcgaa

SEQ ID NO: 1855 - DNA, 494 bp, Artificial
  Mutation introduced by TALE nuclease pair POT33_T02 within a POT33 allele
caagtgtgtgcaatagtagttctactactacaactctcaaaactcctttcatttcatccaatacttctttaggttccactcctaagccctctcaacttttcctccatggaaaacgtaacaaaactttcaaagtctcttgcaaagtttctaatagtggtgaccaaaaccaaaacaatgttcttcttggcttaggaggtctttatggtgttgctaatgctataccattagcagcatcggctactcctataccatcccctgatctcaaaacttgtggtagagccaccatatcggatggtccactagtaccctatacttgttgcccccctcctatgccaactaactttgacaccattccatattacaagttcccttctatgactaaactccgtatccgtccccctgctcatgctgttgatgaggagtatattgctaagtataatttggccataagtcgaatgaaagatcttgataagacagaccctttaaaccctctt

SEQ ID NO: 1856 - DNA, 508 bp, Artificial
  Mutation introduced by TALE nuclease pair POT33_T02 within a POT33 allele
caagtgtgtgcaatagtagttctactactacaactctcaaaactcctttcatttcatccaatacttctttaggttccactcctaagccctctcaacttttcctccatggaaaacgtaacaaaactttcaaagtctcttgcaaagtttctaatagtggtgaccaaaaccaaaacactgttgatcgaagaaatgttcttcttggcttaggaggtctttatggtgttgctaatgctataccattagcagcatcggctactcctataccatcccctgatctcaaaacttgtggtagagccaccatatcggatggtccactagtaccctatacttgttgcccccctcctatgccaactaactttgacaccattccatattacaagttcccttctatgactaaactccgtatccgtcccctgctcatgctgttgatgaggagtatattgctaagtataatttggccataagtcgaatgaaagatcttgataagacagaccctttaaaccctctt

SEQ ID NO: 1857 - DNA, 504 bp, Artificial
  Mutation introduced by TALE nuclease pair POT33_T02 within a POT33 allele
caagtgtgtgcaatagtagttctactactacaactctcaaaactcctttcatttcatccaatacttctttaggttccactcctaagccctttcaacttttcctccatggaaaacgtaacaaaactttcaaagtctcttgcaaagtttctaatagtggtgaccaaaaccaaaaacgaaattctgttgatcgaagaaatgttcttcttggcttaggaggtctttatggtgttgctaatgctataccattagcagcatcggctactcctataccatcccctgatctcaaaacttgtggtagagccaccatatcggatggtccactagtaccctatacttgttgcccccctcctatgccaactaactttgacaccattccatattacaagttcccttctatgactaaactccgtatccgtcccctgctcatgctgttgatgaggagtatattgctaagtataatttggccataagtcgaatgaaagatcttgataagacagacccttt

SEQ ID NO: 1858 - DNA, 545 bp, Artificial
  Mutation introduced by TALE nuclease pair POT33_T02 within a POT33 allele
caagtgtgtgcaatagtagttctactactacaactctcaaaactcctttcatttcatccaatacttctttaggttccactcctaagccctctcaacttttcctccattggaaaacgataacaaaacatttcaaatgtcatcttgctaaagtttcataattagtggtgaccaaaaccaaaacattgtcgccgaacagtgcagcgaacgattctgttgatcgaagaaatgttcttcttggcttaggaggtctttatggtgttgctaatgctataccattagcagcatcggctactcctataccatccctgatctcaaaacttgtggtagagccaccatatcggatggtccactagtaccctatacttgttgcccccctcctatgccaactaactttgacaccattccatattacaagttcccttctatgactaaactccgtatccgtccccctgctcatgctgttgatgagggagtatattgctaagtataatttggccataagtcgaatgaaagatcttgataagacagaccctttaaaccctctt

SEQ ID NO: 1859 - DNA, 421 bp, Artificial
  Mutation introduced by TALE nuclease pair POT33_T02 within a POT33 allele
caagtgtgtgcaatagtagttctactactacaactctcaaaactcctttcatttcatccaatacttctttaggttccactcctaagccctctcaacttttcctccatggaaaacgtaacaaaactttcaaagtctcttgcaaagtttctaatagtggtgaccaaaaccaaaacaagatgattaatcgccagcagggtttcacattgctggaggtcatggcggcgctggcgatttctcaatgcttaaacgaattctgttgatcgaagaaatgttcttcttggcttaggaggtctttatggtgttgctaatgctataccattagcagcatcggctactcctataccatccctgatctcaaaacttgtggtagagccaccatatcggatggtccactagtaccctatacttgttgcccctcctc

SEQ ID NO: 1860 - DNA, 571 bp, Artificial
  Mutation introduced by TALE nuclease pair POT33_T02 within a POT33 allele
caagtgtgtgcaatagtagttctactactacaactctcaaaactcctttcatttcatccaatacttctttaggttccactcctaagcccctctcaacttttcctccatggaaaacgtaacaaaactttcaaagtctcttgcaaagtttctaatagtggtgaccaaaaccaaaaccattgctggcgatggccaccacctgctgggggtcaagccgtgggcctggcacagcaccggcataacgaattctgttgatcgaagaaatgttcttcttggcttaggaggtctttatggtgttgctaatgctataccattagcagcatcggctactcctataccatcccctgatctcaaaacttgtggtagagccaccatatcggatggtccactagtaccctatacttgttgccccctcctatgccaactaactttgatcaccattccatattacaagttcccttctatgactaaactccgtatccgtccctgctcatgctgttgatgaggagtatattgctaagtataatttggccataagtcgaatgaaagatcttgataagacagaccctttaaa

SEQ ID NO: 1861 - DNA, 585 bp, Artificial
  Mutation introduced by TALE nuclease pair POT33_T02 within a POT33 allele
caagtgtgtgcaatagtagttctactactacaactctcaaaactcctttcatttcatccaatacttctttaggttccactcctaagccctctcaacttttcctccatggaaaacgtaacaaaactttcaaagtctcatgcaaagtttctaatagtggtgaccaaaaccaaaacattgaccccggagcaggtggtggccatcgccagcaatattggtggcaagcaggcgctggagacggtgcaggcgctgttgccggtgctgtgcgtaaacgaattctgttgatcgaagaaatgttcttcttggcttaggaggtctttatggtgttgctaatgctataccattagcagcatcggctactcctataccatcccctgatctcaaaacttgtggtagagccaccatatcggatggtccactagtaccctatacttgttgccccctcctatgccaactaactttgacaccattccatattacaagttcccttctatgactaaactccgtatccgtcccctgctcatgctgttgatgaggagtatattgctaagtataatttggcccataagtcgaatgaaagatcttgat

SEQ ID NO: 1862 - DNA, 415 bp, Artificial
  Mutation introduced by TALE nuclease pair POT33_T02 within a POT33 allele
caagtgtgtgcaatagtagttctactactacaactctcaaaactcctttcatttcatccaatacttctttaggttccactcctaagcccctctcaacttttcctccatggaaaacgtaacaaaactttcaaagtctcttgcaaagtttctaatagtggtgaccaaaaccaaaacaagatgattaatcgccagcagggtttcacattgctggaggtcatggcggcgctggcgattttctcaatgcttaaacgaattctgttgatcgaagaaatgttcttcttggcttaggaggtctttatggtgttgctaatgctataccattagcagcatcggctactcctataccatcccctgatctcaaaacttgtggtagagccaccatatcggatggtccactagtaccctatacttgttg

SEQ ID NO: 1863 - DNA, 546 bp, Artificial
  Mutation introduced by TALE nuclease pair POT33_T02 within a POT33 allele
caagtgtgtgcaatagtagttctactactacaactctcaaaactcctttcatttcatccaatacttctttaggttccactcctaagccctctcaacttttcctccatggaaaacgtaacaaaactttcaaagtctcttgcaaagtttctaatagtggtgaccaaaaccaaaacattggtccgcccgaaacaggttggccagcgaaacgaattctgttgatcgaagaaatgttcttcttggcttaggaggtctttatggtgttgctaatgctataccattagcagcatcggctactcctataccatcccctgatctcaaaacttgtggtagagccaccatatcggatggtccactagtaccctatacttgttgcccccctcctatgccaactaactttgacaccattccatattacaagttcccttctatgactaaactccgtatccgtcccctgctcatgctgttgatgaggagtatattgctaagtataatttggccataagtcgaatgaaagatcttgataagacagaccctttaaaccctctt

SEQ ID NO: 1864 - DNA, 543 bp, Artificial
  Mutation introduced by TALE nuclease pair POT33_T02 within a POT33 allele
caagtgtgtgcaatagtagttctactactacaactctcaaaactcctttcatttcatccaatacttctttaggttccactcctaagccctctcaacttttcctccatggaaaacgtaacaaaactttcaaagtctcttgcaaagtttctaatagtggtgaccaaaaccaaaacattgctgatcgagatcgcccggaacagcacccaggaccgtatcctggagatgaaggtgatggagttcttcatgaaggtgaaacgaattctgttgatcgaagaaatgttcttcttggcttaggaggtctttatggtgttgctaatgctataccattagcagcatcggctactcctataccatcccctgatctcaaaacttgtggtagagccaccatatcggatggtccactagtaccctatacttgttgcccctcctatgccaactaaactttgatcaccattccatattacaagttcccttctatcgatctaaactccgtatccgtcccctgctccatgctgttgatgaggagtatattgctaagtataa

SEQ ID NO: 1865 - DNA, 607 bp, Artificial
  Mutation introduced by TALE nuclease pair POT33_T02 within a POT33 allele
caagtgtgtgcaatagtagttctactactacaactctcaaaactcctttcatttcatccaatacttctttaggttccactcctaagcccctctcaacttttcctccatggaaaacgtaacaaaactttcaaagtctcttgcaaagtttctaatagtggtgaccaaaaccaacaggagagcgcacgagggagcttccagggggaaacgcctggtatctttatagtcctgtcgggtttcgccacctctgacttgagcgtcgatttttgtgatgctcgtcaggggggcggaaacgaattctgttgatcgaagaaatgttcttcttggcttaggaggtctttatggtgttgctaatgctataccattagcagcatcggctactcctataccatccctgatctcaaaacttgtggtagagccaccatatcggatggtccactagtaccctatacttgttgccccctcctatgccaactaactttgacaccattccatattacaagttcccttctatgactaaactccgtatccgtcccctgctcatgctgttgatgaggagtatattgctaagtataatttggccataagtcgaatgaaagatcttgataag

SEQ ID NO: 1866 - DNA, 547 bp, Artificial
  Mutation introduced by TALE nuclease pair POT33_T02 within a POT33 allele
caagtgtgtgcaatagtagttctactactacaactctcaaaactcctttcatttcatccaatacttctttaggttccactcctaagcccctctcaacttttcctccatggaaaacgtaacaaaactttcaaagtctcttgcaaagtttctaatagtggtgaccaaaaccaaaacattgccggtgctgtgccaggcccacggcttgaaacgaattctgttgatcgaagaaatgttcttcttggcttaggaggtctttatggtgttgctaatgctataccattagcagcatcggctactcctataccatcccctgatctcaaaacttgtggtagagccaccatatcggatggtccactagtaccctatacttgttgccccctcctatgccaactaactttgacaccattccatattacaagttcccttctatgactaaactccgtatccgtcccctgctcatgctgttgatgaggagtatattgctaagtataatttggccataagtcgaatgaaagatcttgataagacagaccctttaaaccctctt

SEQ ID NO: 1867 - DNA, 568 bp, Artificial
  Mutation introduced by TALE nuclease pair POT33_T02 within a POT33 allele
caagtgtgtgcaatagtagttctactactacaactctcaaaactcctttcatttcatccaatacttctttaggttccactcctaagcccctctcaacttttcctccatggaaaacgtaacaaaactttcaaagtctcttgcaaagtttctaatagtggtgaccaaaaccaaaacataagatccttgagagttttcgccccgaagaacgttttccaatgatgagctgaaacgaattctgttgatcgaagaaatgttcttcttggcttaggaggtctttatggtgttgctaatgctataccattagcagcatcggctactcctataccatcccctgatctcaaaacttgtggtagagccaccatatcggatggtccactagtaccctatacttgttgccccctcctatgccaactaactttgacaccattccatattacaagttcccttctatgactaaactccgtatccgtcccctgctcatgctgttgatgaggagtatattgctaagtataatttggccataagtcgaatgaaagatcttgataagacagaccctttaaaccctctt

SEQ ID NO: 1868 - DNA, 444 bp, Artificial
  Mutation introduced by TALE nuclease pair POT33_T02 within a POT33 allele
caagtgtgtgcaatagtagttctactactacaactctcaaaactcctttcatttcatccaatacttctttaggttccactcctaagccctctcaacttttcctccatggaaaacgtaacaaaactttcaaagtctcttgcaaagtttctaatagtggtgaccaaaaccaaaacattggcggcggcaggccggcgctggagagcattgttgcccagttatctcgccctgatccggcgttggccgcgttgaccaacgaccaacgaattctgttgatcgaagaaatgttcttcttggcttaggaggtctttatggtgttgctaatgctataccattagcagcatcggctactcctataccatcccctgatctcaaaacttgtggtagagccaccatatcggatggtccactagtaccctatacttgttgccccctcctatgccaact

SEQ ID NO: 1869 - DNA, 606 bp, Artificial
  Mutation introduced by TALE nuclease pair POT33_T02 within a POT33 allele
caagtgtgtgcaatagtagttctactactacaactctcaaaactcctttcatttcatccaatacttctttaggttccactcctaagccctctcaacttttcctccatggaaaacgtaacaaaactttcaaagtctcttgcaaagtttctaatagtggtgaccaaaaccaaaacatcccggcaacaattaatagactggatggaggcggataaagttgcaggaccacttcttgcgctcggcccttccggctggctggtttttgaaacgaattctgttgatcgaagaaatgttcttcttggcttaggaggtctttatggtgttgctaatgctataccattagcagcatcggctactcctataccatcccctgatctcaaaacttgtggtagagccaccatatcggatggtccactagtaccctatacttgttgcccctcctatgccaactaactttgacaccattccatattacaagttcccttctatgactaaactccgtatccgtcccctgctcatgctgttgatgaggagtatattgctaagtataatttggcccataagtcgaatgaaagatcttgataagacagaccctttaaaccctcttgg

SEQ ID NO: 1870 - DNA, 546 bp, Artificial
  Mutation introduced by TALE nuclease pair POT33_T02 within a POT33 allele
caagtgtgtgcaatagtagttctactactacaactctcaaaactcctttcatttcatccaatacttctttaggttccactcctaagccctctcaacttttcctccatggaaaacgtaacaaaactttcaaagtctcttgcaaagtttctaatagtggtgaccaaaaccaaaacattgccggtgctgtgccaggcccacggcttgaaacgaattctgttgatcgaagaaatgttcttcttggcttaggaggtctttatggtgttgctaatgctataccattagcagcatcggctactcctataccatcccctgatctcaaaacttgtggtagagccaccatatcggatggtccactagtaccctatacttgttgccccctcctatgccaactaactttgacaccattccatattacaagttcccttctatgactaaactccgtatccgtcccctgctcatgctgttgatgaggagtatattgctaagtataatttggccataagtcgaatgaaagatcttgataagacagaccctttaaaccctctt

SEQ ID NO: 1871 - DNA, 544 bp, Artificial; identical to SEQ ID NO: 1576
  Mutation introduced by TALE nuclease pair POT33_T02 within a POT33 allele

SEQ ID NO: 1872 - DNA, 573 bp, Artificial
  Mutation introduced by TALE nuclease pair POT33_T02 within a POT33 allele
caagtgtgtgcaatagtagttctactactacaactctcaaaactcctttcatttcatccaatacttctttaggttccactcctaagccctctcaacttttcctccatggaaaacgtaacaaaactttcaaagtctcttgcaaagtttctaatagtggtgaccaaaaccaaaacaggtgcaggcgctgttgccggtgctgtgccaggcccacggcttgaccccggagcaggtggtggccatcgccagccacgaattctgttgatcgaagaaatgttcttcttggcttaggaggtctttatggtgttgctaatgctataccattagcagcatcggctactcctataccatcccctgatctcaaaacttgtggtagagccaccatatcggatggtccactagtaccctatacttgttgcccctcctatgccaactaactttgacaccattccatattacaagttcccttctatgactaaactccgtatccgtcccctgctcatgctgttgatgaggagtatattgctaagtataatttggccataagtcgaatgaagatcttgataagacagaccc

SEQ ID NO: 1873 - DNA, 503 bp, Artificial
  Mutation introduced by TALE nuclease pair POT33_T02 within a POT33 allele
caagtgtgtgcaatagtagttctactactacaactctcaaaactcctttcatttcatccaatacttctttaggttccactcctaagccctctcaacttttcctccatggaaaacgtaacaaaactttcaaagtctcttgcaaagtttctaatagtggtgaccaaaaccaaaacatttgatcttctcctgttgctgctggctgtagccgagcgtgcgtagatcacgaattctgttgatcgaagaaatgttcttcttggcttaggaggtctttatggtgttgctaatgctataccattagcagcatcggctactcctataccatcccctgatctcaaaacttgtggtagagccaccatatcggatggtccactagtaccctatacttgttgccccctcctatgccaactaactttgacaccattccatattacaagttcccttctatgactaaactccgtatccgtcccctgctcatgctgttgatgaggagtatattgctaagt

SEQ ID NO: 1874 - DNA, 589 bp, Artificial
  Mutation introduced by TALE nuclease pair POT33_T02 within a POT33 allele
caagtgtgtgcaatagtagttctactactacaactctcaaaactcctttcatttcatccaatacttctttaggttccactcctaagccctctcaacttttcctccatggaaaacgtaacaaaactttcaaagtctcttgcaaagtttctaatagtggtgaccaaaaccaaaacaggtgcaggcgctgttgccggtgctgtgccaggcccacggcttgaccccggagcaggtggtggccatcgccagccacgaattctgttgatcgaagaaatgttcttcttggcttaggaggtctttatggtgttgctaatgctataccattagcagcatcggctactcctataccatcccctgatctcaaaacttgtggtagagccaccatatcggatggtccactagtaccctatacttgttgcccctcctatgccaactaactttgacaccattccatattacaagttcccttctatgactaaactccgtatccgtcccctgctcatgctgttgatgaggagtatattgctaagtataatttggccataagtcgaatgaaagatcttgataagacagaccctttaaaccctcttgg

SEQ ID NO: 1875 - DNA, 520 bp, Artificial
  Mutation introduced by TALE nuclease pair POT33_T02 within a POT33 allele
caagtgtgtgcaatagtagttctactactacaactctcaaaactcctttcatttcatccaatacttctttaggttccactcctaagcccctctcaacttttcctccatggaaaacgtaacaaaactttcaaagtctcttgcaaagtttctaatagtggtgaccaaaaccaaaacgacttttgaacgcgcaataatggtttctgacgtatgtgcttagctcattaaactcaacgaattctgttgatcgaagaaatgttcttcttggcttaggaggtctttatggtgttgctaatgctataccattagcagcatcggctactcctataccatcccctgatctcaaaacttgtggtagagccaccatatcggatggtccactagtaccctatacttgttgccccctcctatgccaactaacttttgacaccattccatattacaagttcccttctatgactaactccgtatccgtcccctgctcatgctgttgatgaggagtatattgctaagtataatttgg

SEQ ID NO: 1876 - DNA, 554 bp, Artificial
  Mutation introduced by TALE nuclease pair POT33_T02 within a POT33 allele
caagtgtgtgcaatagtagttctactactacaactctcaaaactcctttcatttcatccaatacttctttaggttccactcctaagccctctcaacttttcctccatggaaaacgtaacaaaactttcaaagtctcttgcaaagtttctaatagtggtgaccaaaaccaaaacataagatccttgagagttttcgccccgaagaacgttttccaatgatgagctgaaacgaattctgttgatcgaagaaatgttcttcttggcttaggaggtctttatggtgttgctaatgctataccattagcagcatcggctactcctataccatcccctgatctcaaaacttgtggtagagccaccatatcggatggtccactagtaccctatacttgttgccccctcctatgccactaactttgacaccattccatattacaagttcccttctatgactaaactccagtatccgtcccctgctcatgctgttgatgaggagtatattgctaagtataatttggccataagtcgaatgaaagatcttgataagacagaccc

SEQ ID NO: 1877 - DNA, 563 bp, Artificial
  Mutation introduced by TALE nuclease pair POT33_T02 within a POT33 allele
caagtgtgtgcaatagtagttctactactacaactctcaaaactcctttcatttcatccaatacttctttaggttccactcctaagcccctctcaacttttcctccatggaaaacgtaacaaaactttcaaagtctcttgcaaagtttctaatagtggtgaccaaaaccaaaacaaacaagcaggcgctggagacggtccagcggctgttgccggtgctgtgccaggcccaaaacgaattctgttgatcgaagaaatgttcttcttggcttaggaggtctttatggtgttgctaatgctataccattagcagcatcggctactcctataccatccctgatctcaaaacttgtggtagagccaccatatcggatggtccactagtaccctatacttgttgcccctcctcgcactgcaacttagctcaccattccatattacaagttcccttctatgactaaactccgtatccgtccctgctcatgctgttgatgaggagtatattgctaagtataatttggccataagtcgaatgaaagatcttgataagacagaccctttaaa

SEQ ID NO: 1878 - DNA, 545 bp, Artificial
  Mutation introduced by TALE nuclease pair POT33_T02 within a POT33 allele
caagtgtgtgcaatagtagttctactactacaactctcaaaactcctttcatttcatccaatacttctttaggttccactcctaagcccctctcaacttttcctccatggaaaacgtaacaaaactttcaaagtctcttgcaaagtttctaatagtggtgaccaaaaccaaatcttgcgatgattatcatataatttctgttgaaacgaattctgttgatcgaagaaatgttcttcttggcttaggaggtctttatggtgttgctaatgctataccattagcagcatcggctactcctataccatcccctgatctcaaaacttgtggtagagccaccatatcggatggtccactagtaccctatacttgttgccccctcctatgccaactaactttgacaccattccatattacaagttcccttctatgactaaactccgtatccgtcccctgctcatgctgttgatgaggagtatattgctaagtataatttggccataagtcgaatgaaagatcttgataagacagaccctttaaaccctctt

SEQ ID NO: 1879 - DNA, 590 bp, Artificial
  Mutation introduced by TALE nuclease pair POT33_T02 within a POT33 allele
caagtgtgtgcaatagtagttctactactacaactctcaaaactcctttcatttcatccaatacttctttaggttccactcctaagccctctcaacttttcctccatggaaaacgtaacaaaactttcaaagtctcttgcaaagtttctaatagtggtgaccaaaaccaaaacaggtgcaggcgctgttgccggtgctgtgccaggcccacggcttgaccccggagcaggtggtggccatcgccagccacgaattctgttgatcgaagaaatgttcttcttggcttaggaggtctttatggtgttgctaatgctataccattagcagcatcggctactcctataccatcccctgatctcaaaacttgtggtagagccaccatatcggatggtccactagtaccctatacttgttgccccctcctatgccaactaactttgacaccattccatattacaagttcccttctatgactaaactccgtatccgtcccctgctcatgctgttgatgaggagtatattgctaagtataatttggccataagtcgaatgaaagatcttgataagacagaccctttaaaccctcttgg

SEQ ID NO: 1880 - DNA, 567 bp, Artificial
  Mutation introduced by TALE nuclease pair POT33_T02 within a POT33 allele
caagtgtgtgcaatagtagttctactactacaactctcaaaactcctttcatttcatccaatacttctttaggttccactcctaagccctctcaacttttcctccatggaaaacgtaacaaaactttcaaagtctcttgcaaagtttctaatagtggtgaccaaaaccaaaacataagatccttgagagttttcgccccgaagaacgttttccaatgatgagctgaaacgaattctgttgatcgaagaaatgttcttcttggcttaggaggtctttatggtgttgctaatgctataccattagcagcatcggctactcctataccatcccctgatctcaaaacttgtggtagagccaccatatcggatggtccactagtaccctatacttgttgccccctcctatgccaactaactttgacaccattccatattacaagttcccttctatgactaaactccgtatccgtcccctgctcatgctgttgatgaggagtatattgctaagtataatttggccataagtcgaatgaaagatcttgataagacagaccctttaaaccctctt

SEQ ID NO: 1881 - DNA, 566 bp, Artificial
  Mutation introduced by TALE nuclease pair POT33_T02 within a POT33 allele
caagtttgtgcaatagtagttctactactacaactctcaaaactcctttcatttcatccaatacttctttaggttccactcctaagccctctcaacttttcctccatggaaaacgtaacaaaactttcaaagtctcttgcaaagtttctaatagtggtgaccaaaaccaaaacatgcaccatatgcggtgtgaaataccgcacagatgcgtaaggagaaaataccgcatcgaaacgaattctgttgatcgaagaaatgttcttcttggcttaggaggtctttatggtgttgctaatgctataccattagcagcatcggctactcctataccatcccctgatctcaaaacttgtggtagagccaccatatcggatggtccactagtaccctatacttgttgccccctcctatgccaactaactttgacaccattccatattacaagttcccttctatgactaaactccgtatccgtcccctgctcatgctgttgatgaggagtatattgctaagtataatttggccataagtcgaatgaaagatcttgataagacagaccctttaaa

SEQ ID NO: 1882 - DNA, 545 bp, Artificial
  Mutation introduced by TALE nuclease pair POT33_T02 within a POT33 allele
caagtgtgtgcaatagtagttctactactacaactctcaaaactcctttcatttcatccaatacttctttaggttccactcctaagccctctcaacttttcctccatggaaaacgtaacaaaactttcaaagtctcttgcaaagtttctaatagtggtgaccaaaaccaaatcttgcgatgattatcatataatttctgttgaaacgaattctgttgatcgaagaaatgttcttcttggcttaggaggtctttatggtgttgctaatgctataccattagcagcatcggctactcctataccatcccctgatctcaaaacttgtggtagagccaccatatcggatggtccactagtaccctatacttgttgcccccctcctatgccaactaactttgacaccattccatattacaagttcccttctatgactaaactccgtatccgtcccctgctcatgctgttgatgaggagtatattgctaagtataatttggccataagtcgaatgaaagatcttgataagacagaccctttaaaccctctt

SEQ ID NO: 1883 - DNA, 563 bp, Artificial
  Mutation introduced by TALE nuclease pair POT33_T02 within a POT33 allele
caagtgtgtgcaatagtagttctactactacaactctcaaaactcctttcatttcatccaatacttctttaggttccactcctaagcccctctcaacttttcctccatggaaaacgtaacaaaactttcaaagtctcttgcaaagtttctaatagtggtgaccaaaaccaaaacattgtttcgtgtcgcgcgtttcggtgatgacggtgaaaacctctgacacatgcaaacgaattctgttgatcgaagaaatgttcttcttggcttaggaggtctttatggtgttgctaatgctataccattagcagcatcggctactcctataccatcccctgatctcaaaacttgtggtagagccaccatatcggatggtccactagtaccctatacttgttgccccctcctatgccaactaacttttgacaccattccatattacaagttcccttctatgactaactccgtatccgtcccctgctcatgctgttgatgaggagtatattgctaagtataatttggccataagtcgaatgaaaggatcttgataagacagaccctttaaa

SEQ ID NO: 1884 - DNA, 420 bp, Artificial
  Mutation introduced by TALE nuclease pair POT33_T02 within a POT33 allele
  misc_feature (336): n is a or c or t or g
caagtgtgtgcaatagtagttctactactacaactctcaaaactcctttcatttcatccaatacttctttaggttccactcctaagccctctcaacttttcctccatggaaaacgtaacaaaactttcaaagtctcttgcaaagtttctaatagtggtgaccaaaaccaaaacataagatccttgagagttttcgccccgaagaacgttttccaatgatgagctgaaacgaattctgttgatcgaagaaatgttcttcttggcttaggaggtctttatggtgttgctaatgctataccattagcagcatcggctactcctataccatcccctgatntcaaaacttgtggtagagccaccatatcggatggtccactagtaccctatacttgttgccccctcctatgccaacataactttg

SEQ ID NO: 1885 - DNA, 599 bp, Artificial
  Mutation introduced by TALE nuclease pair POT33_T02 within a POT33 allele
caagtgtgtgcaatagtagttctactactacaactctcaaaactcctttcatttcatccaatacttctttaggttccactcctaagccctctcaacttttcctccatggaaaacgtaacaaaactttcaaagtctcttgcaaagtttctaatagtggtgaccaaaaccaaacaagcaggcgctggagacggtccagcggctgttgccggtgctgtgccaggcccacggcttgaccccggagcaggtggtggccaaaacgaattctgttgatcgaagaaatgttcttcttggcttaggaggtctttatggtgttgctaatgctataccattagcagcatcggctactcctataccatcccctgatctcaaaacttgtggtagagccaccatatcggatggtccactagtaccctatacttgttgccccctcctatgccaactaactttgacaccattccatattacaagttcccttctatgactaaactccgtatccgtcccctgctcatgctgttgatgaggagtatattgctaaagtataatttggccataagtcgaatgaaagatcttgataagacagaccctttaaaccctcttgg

SEQ ID NO: 1886 - DNA, 573 bp, Artificial
  Mutation introduced by TALE nuclease pair POT33_T02 within a POT33 allele
caagtgtgttcaatagtagttctactactacaactctcaaaactcctttcatttcatccaatacttctttaggttccactcctaagcccctctcaacttttcctccatggaaaacgtaacaaaactttcaaagtctcttgcaaagtttctaatagtggtgaccaaaaccaaaacaaataatctgcaccggatctcgcccttacctgctagtcatgggcgatcctaaaagaaacgtaaggtcatcgataaggagaccgccgctgccaagttcgagagacagcacatggacagcatcgatatcgccgatctacgcacgctcggctacagccagcagcaacaggagacgaattctgttgatcgaagaaatgttcttcttggcttaggaggtctttatggtgttgctaatgctataccattagcagcatcggctactcctataccatcccctgatctcaaaacttgtggtagagccaccatatcggatggtccactagtaccctatacttgttgcccctcctatgcccaactaactttgacaccattccatattacaagttcccttctatgactaaa

SEQ ID NO: 1887 - DNA, 547 bp, Artificial
  Mutation introduced by TALE nuclease pair POT33_T02 within a POT33 allele
caagtgtgtgcaatagtagttctactactacaactctcaaaactcctttcatttcatccaatacttctttaggttccactcctaagcccctctcaacttttcctccatggaaaacgtaacaaaactttcaaagtctcttgcaaagtttctaatagtggtgaccaaaaccaaaacgaatgacttggttgagtactcaccagtcacaaaacgaattctgttgatcgaagaaatgttcttcttggcttaggaggtctttatggtgttgctaatgctataccattagcagcatcggctactcctataccatcccctgatctcaaaacttgtggtagagccaccatatcggatggtccactagtaccctatacttgttgccccctcctatgccactaactttgacaccattccatattacaagttccctttctatgactaaactccgtatccgtcccctgctcatgctgttgatgaggagtatattgctaagtataatttggccataagtcgaatgaaagatcttgataagacagaccctttaaaccctctt

SEQ ID NO: 1888 - DNA, 545 bp, Artificial; identical to SEQ ID NO: 1674
  Mutation introduced by TALE nuclease pair POT33_T02 within a POT33 allele

SEQ ID NO: 1889 - DNA, 395 bp, Artificial; identical to SEQ ID NO: 1677
  Mutation introduced by TALE nuclease pair POT33_T02 within a POT33 allele

SEQ ID NO: 1890 - DNA, 590 bp, Artificial
  Mutation introduced by TALE nuclease pair POT33_T02 within a POT33 allele
caagtgtgtgcaatagtagttctactactacaactctcaaaactcctttcatttcatccaatacttctttaggttccactcctaagcccctctcaacttttcctccatggaaaacgtaacaaaactttcaaagtctcttgcaaagtttctaatagtggtgaccaaaaccaaaacaagatgattaatcgccagcagggtttcacattgctggaggtcatggcggcgctggcgattttctcaatgcttaaacgaattctgttgatcgaagaaatgttcttcttggcttaggaggtctttatggtgttgctaatgctataccattagcagcatcggctactcctataccatcccctgatctcaaaacttgtggtagagccaccatatcggatggtccactagtaccctatacttgttgcccctcctatgccaactaaactttgacaccattccatattacaagttcccttctatgactaaactcgtatccgtcccctgctccatgctgttgatgaggagtatattgctaagtataatttggccataagtcgaatgaaagatcttgataagacagaccctttaaaccctcttgg

SEQ ID NO: 1891 - DNA, 580 bp, Artificial
  Mutation introduced by TALE nuclease pair POT33_T02 within a POT33 allele
caagtgtgtgcaatagtagttctactactacaactctcaaaactcctttcatttcatccaatacttctttaggttccactcctaagcccctctcaacttttcctccatggaaaacgtaacaaaactttcaaagtctcttgcaaagtttctaatagtggtgaccaaaaccaaaacctagatccttttaaattaaaatgaagttttaaaatcaatctaaagtatatatgagtaaacttggtctgacaaaacgaattctgttgatcgaagaaatgttcttcttggcttaggaggtctttatggtgttgctaatgctataccattagcagcatcggctactcctataccatcccctgatctcaaaacttgtggtagagccaccatatcggatggtccactagtaccctatacttgttgccccctcctatgccaactaactttgacaccattccatattacaagttcccttctatgactaaactccgtatccgtcccctgctcatgctgttgatgaggagtatattgctaagtataatttggccataagtcgaatgaaagatcttgataagacagaccctttaaa

SEQ ID NO: 1892 - DNA, 489 bp, Artificial
  Mutation introduced by TALE nuclease pair POT33_T02 within a POT33 allele
caagtgtgtgcaatagtagttctactactacaactctcaaaactcctttcatttcatccaatacttctttaggttccactcctaagccctctcaacttttcctccatggaaaacgtaacaaaactttcaaagtctcttgcaaagtttctaatagtggtgaccaaaaccaaaacatttgatcttctcctgttgctgctggctgtagccgagcgtgcgtagatcacgaattctgttgatcgaagaaatgttcttcttggcttaggaggtctttatggtgttgctaatgctataccattagcagcatcggctactcctataccatcccctgatctcaaaacttgtggtagagccaccatatcggatggtccactagtaccctatacttgttgccccctcctatgccaactaactttgacaccattccatattacaagttcccttctatgactaactccgtatccgtcccctgctcatgctgttgatgaggag

SEQ ID NO: 1893 - DNA, 549 bp, Artificial
  Mutation introduced by TALE nuclease pair POT33_T02 within a POT33 allele
caagtgtgtgcaatagtagttctactactacaactctcaaaactcctttcatttcatccaatacttctttaggttccactcctaagccctctcaacttttcctccatggaaaacgtaacaaaactttcaaagtcatcttgcaaagtttctaatagtggtgaccaaaaccaaaacattgccggtgctgtgccaggcccacggcttgaaacgaattctgttgatcgaagaaatgttcttcttggcttaggaggtctttatggtgttgcttaatgactataccattagcagcatcggctactcctataccatcccctgatctcaaaacttgtggtagagccaccatatcggatggtccactagtaccctatacttgttgcccccctctatgccaactaactttgacaccattccatattacaagttcccttctatgactaaactccgtatccgtcccctgctcatgctgttgatgaggagtatattgctaagtataatttggccataagtcgaatgaaagatcttgataagacagaccctttaaaccctctt

SEQ ID NO: 1894 - DNA, 423 bp, Artificial
  Mutation introduced by TALE nuclease pair POT33_T02 within a POT33 allele
caagtgtgtgcaatagtagttctactactacaactctcaaaactcctttcatttcatccaatacttctttaggttccactcctaagcccctctcaacttttcctccatggaaaacgtaacaaaactttcaaagtctcttgcaaagtttctaatagtggtgaccaaaaccaaaacattgctgatcgagatcgcccggaacagcacccaggaccgtatcctggagatgaaggtgatggagttcttcatgaaggtgaaacgaattctgttgatcgaagaaatgttcttcttggcttaggaggtctttatggtgttgctaatgctataccattagcagcatcggctactccctataccatcccctgatctcaaacttgtggtagagccaccatatcggatggtccactagtaccctatcacttgttg

SEQ ID NO: 1895 - DNA, 412 bp, Artificial
  Mutation introduced by TALE nuclease pair POT33_T02 within a POT33 allele
caagtgtgtgcaatagtagttctactactacaactctcaaaactcctttcatttcatccaatacttctttaggttccactcctaagccctctcaacttttcctccatggaaaacgtaacaaaactttcaaagtctcttgcaaagtttctaatagtggtgaccaaaaccaaaacaaccgccgctgccaagttcgagagacagcacatggacagcatcgatatcgccgatctacgcaaacgaattctgttgatcgaagaaatgttcttcttggcttaggaggtctttatggtgttgctaatgctataccattagcagcatcggctactcctataccatcccctgatctcaaaacttgtggtagagccaccatatcggatggtccactagtaccctatacttgttgccccctcct

SEQ ID NO: 1896 - DNA, 586 bp, Artificial
  Mutation introduced by TALE nuclease pair POT33_T02 within a POT33 allele
caagtgtgtgcaatagtagttctactactacaactctcaaaactcctttcatttcatccaatacttctttaggttccactcctaagccctctcaacttttcctccatggaaaacgtaacaaaactttcaaagtctcttgcaaagtttctaatagtggtgaccaaaaccaatgcgccacgaggcactggtcggccacgggtttacacacgcgcacatcgttgcgttaagccaacacccggcagcgttagggaccgtcgctgtcaagtatcaggacattaacgaattctgttgatcgaagaaatgttcttcttggcttaggaggtctttatggtgttgctaatgctataccattagcagcatcggctactcctataccatccctgatctcaaaacttgtggtagagccaccatatcggatggtccactagtacctatacttgttgccccctcctatgccaactaactttgacaccattccatattacaagttcccttctatgactaaactccgtatccgtcccctgctcatgctgttgatgaggagtatattgctaagtataatttggccataagtcgaatgaaagat

SEQ ID NO: 1897 - DNA, 569 bp, Artificial
  Mutation introduced by TALE nuclease pair POT33_T02 within a POT33 allele
caagtgtgtgcaatagtagttctactactacaactctcaaaactcctttcattccatccaatacttctttaggttccactcctaagcccctctcaacttttcctccatggaaaacgtaacaaaactttcaaagtctcttgcaaagtttctaatagtggtgaccaaaaccaaaacattggcctgcctcggcgggcgtcctgcgctggatgcagtgaaaaagggattgaaacgaattctgttgatcgaagaaatgttcttcttggcttaggaggtctttatggtgttgctaatgctataccattagcagcatcggctactcctataccatcccctgatctcaaaacttgtggctagagccaccatatcggatggtccactagtaccctatacttgttgccccctcctatgccaactaactttgacaccattccatattacaagttcccttctatgactaaactccgtatccgtcccctgctcatgctgttgatgaggagtatattgctaagtataatttggccataagtcgaatgaaaggatcttgataagacagaccctttaaaccctct

SEQ ID NO: 1898 - DNA, 606 bp, Artificial
  Mutation introduced by TALE nuclease pair POT33_T02 within a POT33 allele
caagtgtgtgcaatgtagttctactactacaactctcaaaactcctttcatttcatccaatacttctttaggttccactcctaagccctctcaacttttcctccatggaaaacgtaacaaaactttcaaagtctcttgcaaagtttctaatagtgcaccgtctccagcgcctgcttgccaccaatattgctggcgatggccaccacctgctccggggtcaagccgtgggcctggcacagcaccggcaacagccgctggaccgtctccagcgcctgcttgccaccattaaacgaattctgttgatcgaagaaatgttcttcttggcttaggaggtctttatggtgttgctaatgctataccattagcagcatcggctactcctataccatccctgatctcaaacttgtggtagagccaccatatcggatggtccactagtaccctatacttgttgccccctcctatgccaactaactttgacaccattccatattacaagttcccttctatgactaaactccgtatccgtcccctgctcatgctgttgatgaggagtatattgctaagtataatttggccataagtcgaatgaaagatcttgataag

SEQ ID NO: 1899 - DNA, 640 bp, Artificial
  Mutation introduced by TALE nuclease pair POT33_T02 within a POT33 allele
caagtgtgtgcaatagtagttctactactacaactctcaaaactcctttcatttcatccaatacttctttaggttccactcctaagccctctcaacttttcctccatggaaaacgtaacaaaactttcaaagtctcttgcaaagtttctaatagtggtgaccaaaaccaaaacattgagaaagcgccacgcttcccgaagggagaaaggcggacaggtatccggtaagcggcagggtcggaacaggagagcgcacgagggagcttccagggggaaacgcctggtatctttatagtcctgtcgggtttcgccacctctgaaacgaattctgttgatcgaagaaatgttcttcttggcttaggaggtctttatggtgttgctaatgctataccattagcagcatcggctactcctataccatcccctgatctcaaaacttgtggtagagccaccatatcggatggtccactagtaccctatacttgttgccccctcctatgccaactaactttgacaccattccatattacaaggttcccttctatgactaaactccgtatccgtcccctgctcatgctgttgatgaggagtatattgctaagtataatttggccataagtcgaatgaaagatcttgataag

SEQ ID NO: 1900 - DNA, 545 bp, Artificial; identical to SEQ ID NO: 1721
  Mutation introduced by TALE nuclease pair POT33_T02 within a POT33 allele

SEQ ID NO: 1901 - DNA, 497 bp, Artificial
  Mutation introduced by TALE nuclease pair POT33_T02 within a POT33 allele
caagtttgtgcaatagtagttctactactacaactctcaaaactcctttcatttcatccaatacttctttaggttccactcctaagccctctcaacttttcctccatggaaaacgtaacaaaactttcaaagtctcttgcaaagtttctaatagtggtgaccaaaaccaaaacatgcaccatatgcggtgtgaaataccgcacagatgcgtaaggagaaaataccgcatcgaaacgaattctgttgatcgaagaaatgttcttcttggcttaggaggtctttatggtgttgctaatgctataccattagcagcatcggctactcctataccatcccctgatctcaaaacttgtggtagagccaccatatcggatggtccactagtaccctatacttgttgccccctcctatgccaactaactttgacaccattccatattacaagttcccttctatgactaaactccgtatccgtcccctgctcatgctgttgatga

SEQ ID NO: 1902 - DNA, 593 bp, Artificial
  Mutation introduced by TALE nuclease pair POT33_T02 within a POT33 allele
caagtgtgtgcaatagtagttctactactacaactctcaaaactcctttcatttcatccaatacttctttaggttccactcctaagcccctctcaacttttcctccatggaaaacgtaacaaaactttcaaagtctcttgcaaagtttctaatagtggtgaccaaaaccaaaacaggtgcaggcgctgttgccggtgctgtgccaggcccacggcttgaccccggagcaggtggtggccatcgccagccacgaattctgttgatcgaagaaatgttcttcttggcttaggaggtctttatggtgttgctaatgctataccattagcagcatcggctactcctataccatcccctgatctcaaaacttgtggtagagccaccatatcggatggtccactagtaccctatacttgttgccccctcctatgccaactaactttgacaccattccatattacaagttcccttctatgactaaactccgtatccgtcccctgctcatgctgttgatgaggagtatattgctaagtataattttggcccataagtcgaatgaaagatcttgataagacagaccctttaaaccctcttgg

SEQ ID NO: 1903 - DNA, 668 bp, Artificial
  Mutation introduced by TALE nuclease pair POT33_T02 within a POT33 allele
caagtgtgtgcaatagtagttctactactacaactctcaaaactcctttcatttcatccaatacttctttaggttccactcctaagccctctcaacttttcctccatggaaaacgtaacaaaactttcaaagtctcttgcaaagtttctaatagtggtgaccaaaaccaaaacttactctagcttcccggcaacaattaatagactggatggaggcggataaagttgcaggaccacttctgcgctcggcccttccggctggctggtttattgctgataaatctggagccggtgagcgtgggtctcgcggtatcattgcagcactggggccagcgaattctgttgatcgaagaaatgttcttcttggcttaggaggtctttatggtgttgctaatgctataccattagcagcatcggctatctctataccatcccctgatctcaaaacttgtggtagagccaccatatcggatggtccactagtaccctatacttgttgccccctcctatgccaactaactttgacaccattccatattacaagttcccttctatgactaaactccgtatccgtcccctgctcatgctgttgatgaggagtatattgctaagtataatttggccataagtcgaatgaaacgatcttgataagacagaccctttaaaccc

SEQ ID NO: 1904 - DNA, 543 bp, Artificial
  Mutation introduced by TALE nuclease pair POT33_T02 within a POT33 allele
caagtgtgtgcaatagtagttctactactacaactctcaaaactcctttcatttcatccaatacttctttaggttccactcctaagccctctcaacttttcctccatggaaaacgtaacaaaactttcaaagtctcttgcaaagtttctaatagtggtgaccaaaaccaaatcttgcgatgattatcatataatttctgttgaaacgaattctgttgatcgaagaaatgttcttcttggcttaggaggtctttatggtgttgctaatgctataccattagcagcatcggctactcctataccatcccctgatctcaaaacttgtggtagagccaccatatcggatggtccactagtaccctatacttgttgccccctcctatgccaactaactttgacaccattccatattacaagttcccttctatgactaaactccgtatccgtcccctgctcatgctgttgatgaggagtatattgctaagtataatttggccataagcgatgaatgaatcttgataagacagaccctttaaaccctctt

SEQ ID NO: 1905 - DNA, 577 bp, Artificial
  Mutation introduced by TALE nuclease pair POT33_T02 within a POT33 allele
caagtgtgtgcaatagtagttctactactacaactctcaaaactcctttcatttcatccaatacttctttaggttccactcctaagcccctctcaacttttcctccatggaaaacgtaacaaaactttcaaagtctcttgcaaagtttctaatagtggtgaccaaaaccaaaacaaccgccgctgccaagttcgagagacagcacatggacagcatcgatatcgccgatctacgcaaacgaattctgttgatcgaagaaatgttcttcttggcttaggaggtctttatggtgttgctaatgctataccattagcagcatcggctactcctataccatcccctgatctcaaaacttgtggtagagccaccatatcggatggtccactagtaccctatacttgttgcccctcctatgccaactaactttgacaccattccatattacaagttcccttctatgactaaactcgtatccgtcccctgctcatgctgttgatgaggagtatattgctaagtataatttggccataagtcgaatgaaagatcttgataagacagaccctttaaaccctcttgg

SEQ ID NO: 1906 - DNA, 595 bp, Artificial
  Mutation introduced by TALE nuclease pair POT33_T02 within a POT33 allele
  misc_feature (508); (528); (544): n is a or c or t or g
caagtgtgtgcaatagtagttctactactacaactctcaaaactcctttcatttcatccaatacttctttaggttccactcctaagcccctctcaacttttcctccatggaaaacgtaacaaaactttcaaagtctcttgcaaagtttctaatagtggtgaccaaaaccaaaacagagccactcagccgcgggtttctggagtttaatgagctaagcacatacgtcagaaaccattattgcgcgttcaaaagtcggagccactcagccgcgggtttctggagttaaaacgaattctgttgatcgaagaaatgttcttcttggcttaggaggtctttatggtgttgctaatgctataccattagcagcatcggctactcctataccatccctgatctcaaaacttgtggtagagccaccatatcggatggtccactagtaccctataccttgttgccccctcctatgccaactaactttgacaccattccatattacaagttcccttcnattcgactaaacttccagtntccgtcccccttgctnatgctgttgatgaggagtatattgctaagtataatttggccataagtcgaa

SEQ ID NO: 1907 - DNA, 556 bp, Artificial
  Mutation introduced by TALE nuclease pair POT33_T02 within a POT33 allele
caagtgtgtgcaatagtagttctactactacaactctcaaaactcctttcatttcatccaatacttctttaggttccactcctaagccctctcaacttttcctccatggaaaacgtaacaaaactttcaaagtctcttgcaaagtttctaatagtggtgaccaaaaccaaaacaaccgccgctgccaagttcgagagacagcacatggacagcatcgatatcgccgatctacgcaaaacgaattctgttgatcgaagaaatgttcttcttggcttaggaggtctttatggtgttgctaatgctataccattagcagcatcggctactcctataccatccccctgatctcaaaacttgtggtagagccaccatatcggatgggtccactagtaccctatacttgttgccccctcctatgccaactaactttgacaccattccatatttacaagttcccttctatgactaaactccgtatccgtcccctgctcatgctgttgatgaggagtatattgctaagtataatttggtccataagtcgaatgaaagatcttga

SEQ ID NO: 1908 - DNA, 579 bp, Artificial
  Mutation introduced by TALE nuclease pair POT33_T02 within a POT33 allele
caagtgtgtgcaatagtagttctactactacaactctcaaaactcctttcatttcatccaatacttctttaggttccactcctaagcccctctcaacttttcctccatggaaaacgtaacaaaactttcaaagtctcttgcaaagtttctaatagtggtgaccaaaaccaaaacctagatccttttaaattaaaatgaagttttaaatcaatctaaagtatatatgagtaaacttggtctgacaaaacgaattctgttgatcgaagaaatgttcttcttggcttaggaggtctttatggtgttgctaatgctataccattagcagcatcggctactcctataccatcccctgatctcaaaacttgtggtagagccaccatatcggatggtccactagtaccctatacttgttgccccctcctatgccaactaactttgacaccattccatattacaagttcccttctatgactaaactccgtatccgtcccctgctcatgctgttgatgaggagtatattgctaagtataatttggccataagtcgaatgaaagatcttgataagacagaccctttaaa

SEQ ID NO: 1909 - DNA, 532 bp, Artificial
  Mutation introduced by TALE nuclease pair POT33_T02 within a POT33 allele
caagtgtgtgcaatagtagttctactactacaactctcaaaactcctttcatttcatccaatacttctttaggttccactcctaagcccctctcaacttttcctccatggaaaacgtaacaaaactttcaaagtctcttgcaaagtttctaatagtggtgaccaaaaccaaaacaggtgcaggcgctgttgccggtgctgtgccaggcccacggcttgaccccggagcaggtggtggccatcgccagccacgaattctgttgatcgaagaaatgttcttcttggcttaggaggtctttatggtgttgctaatgctataccattagcagcatcggctactcctataccatcccctgatctcaaaacttgtggtagagccaccatatcggatggtccactagtaccctatacttgttgccccctcctatgccaactaactttgacaccattccatattacaagttcccttctatgactaaactccgtatccgtcccctgctcatgctgttgatgaggagtatattgctaagtat

SEQ ID NO: 1910 - DNA, 578 bp, Artificial
  Mutation introduced by TALE nuclease pair POT33_T02 within a POT33 allele
caagtgtgtgcaatagtagttctactactacaactctcaaaactcctttcatttcatccaatacttctttaggttccactcctaagcccctctcaacttttcctccatggaaaacgtaacaaaactttcaaagtctcttgcaaagtttctaatagtggtgaccaaaaccaaaacctagatccttttaaattaaaatgaagttttaaatcaatctaaagtatatatgagtaaacttggtctgacaaaacgaattctgttgatcgaagaatgttcttcttggcttaggaggtctttatggtgttgctaatgctataccattagcagcatcggctactcctataccatcccctgatctcaaaacttgtggtagagccaccatatcggatggtccactagtaccctatacttgttgccccctcctatgccaactaactttgacaccattccatattacaagttcccttctatgactaaactccgtatccgtcccctgctcatgctgttgatgaggagtatattgctaagtataatttggccataagtcgaatgaaagatcttgataagacagaccctttaaa

SEQ ID NO: 1911 - DNA, 405 bp, Artificial
  Mutation introduced by TALE nuclease pair POT33_T02 within a POT33 allele
caagtgtgtgcaatagtagttctactactacaactctcaaaactcctttcatttcatccaatacttctttaggttccactcctaagccctctcaacttttcctccatggaaaacgtaacaaaactttcaaagtctcttgcaaagtttctaatagtggtgaccaaaaccaaaacaaccgccgctgccaagttcgagagacagcacatggacagcatcgatatcgccgatctacgcaaacgaattctgttgatcgaagaaatgttcttcttggcttaggaggtctttatggtgttgctaatgctataccattagcagcatcggctactcctataccatcccctgatctcaaaacttgtggtagagccaaccatatcggatgggtccactagtaccctatacttgttg

SEQ ID NO: 1912 - DNA, 532 bp, Artificial
  Mutation introduced by TALE nuclease pair POT33_T02 within a POT33 allele
caagtttgtgcaatagtagttctactactacaactctcaaaactcctttcatttcatccaatacttctttaggttccactcctaagccctctcaacttttcctccatggaaaacgtaacaaaactttcaaagtctcttgcaaagtttctaatagtggtgaccaaaaccaaaacatgcaccatatgcggtgtgaaataccgcacagatgcgtaaggagaaaataccgcatcgaaacgaattctgttgatcgaagaaatgttcttcttggcttaggaggtctttatggtgttgctaatgctataccattagcagcatcggctactcctataccatcccctgatctcaaaacttgtggtagagccaccatatcggatggtccactagtaccctatacttgttgccccctcctatgccaactaactttgacaccattccatattacaagttcccttctatgactaaactccgtatccgtcccctgctcatgctgttgatgaggagtatattgctaagtataatttggccataagtc

SEQ ID NO: 1913 - DNA, 414 bp, Artificial
  Mutation introduced by TALE nuclease pair POT33_T02 within a POT33 allele
caagtgtgtgcaatagtagttctactactacaactctcaaaactcctttcatttcatccaatacttctttaggttccactcctaagccctctcaacttttcctccatggaaaacgtaacaaaactttcaaagtctcttgcaaagtttctaatagtggtgaccaaaaccaaaacaggagacggtccagcggctgttgccggtgctgtgccaggcttagctcattaaactccagaaacccgcggctgaaacgaattctgttgatcgaagaaatgttcttcttggcttaggaggtctttatggtgttgctaatgctataccattagcagcatcggctactcctataccatcccctgatctcaaaacttgtggtagagacaccatatcggatggtccactagtaccctatacttgttg

SEQ ID NO: 1914 - DNA, 541 bp, Artificial
  Mutation introduced by TALE nuclease pair POT33_T02 within a POT33 allele
caagtgtgtgcaatagtagttctactactacaactctcaaaactcctttcatttcatccaatacttctttaggttccactcctaagccctctcaacttttcctccatggaaaacgtaacaaaactttcaaagtctcttgcaaagtttctaatagtggtgaccaaaaccaaaacatttgatcttctcctgttgctgctggctgtagccgagcgtgcgtagatcacgaattctgttgatcgaagaaatgttcttcttggcttaggaggtctttatggtgttgctaatgctataccattagcagcatcggctactcctataccatcccctgatctcaaaacttgtggtagagccaccatatcggatggtccactagtaccctatacttgttgccccctcctatgccaactaactttgacaccattccatattacaagttcccttctatgactaaactccgtatccgtcccctgctcatgctgttgatgaggagtatattgctaagtataatttggccataagtcgaatgaaagatcttgataag

SEQ ID NO: 1915 - DNA, 594 bp, Artificial
  Mutation introduced by TALE nuclease pair POT33_T02 within a POT33 allele
caagtgtgtgcaatagtagttctactactacaactctcaaaactcctttcatttcatccaatacttctttaggttccactcctaagcccctctcaacttttcctccatggaaaacgtaacaaaactttcaaagtctcttgcaaagtttctaatagtggtgaccaaaaccaaaacaggtgcaggcgctgttgccggtgctgtgccaggcccacggcttgaccccggagcaggtggtggccatcgccagccacgaattctgttgatcgaagaaatgttcttcttggcttaggaggtctttatggtgttgctaatgctataccattagcagcatcggctactcctataccatcccctgatctcaaaacttgtggtagagccaccatatcggatggtccactagtaccctatacttgttgccccctcctatgccaactaacttttgacaccattccatattacaagttcccttctatgactaaactccgtatccgtcccctgctcatgctgtttgatgaggagtatattgctaagtataatttggcccataagtcgaatgaaagatcttgataagacagaccctttaaaccctcttgg

SEQ ID NO: 1916 - DNA, 579 bp, Artificial
  Mutation introduced by TALE nuclease pair POT33_T02 within a POT33 allele
  misc_feature (473): n is a or c or t or g
caagtgtgtgcaatagtagttctactactacaactctcaaaactcctttcatttcatccaatacttctttaggttccactcctaagcccctctcaacttttcctccatggaaaacgtaacaaaactttcaaagtctcttgcaaagtttctaatagtggtgaccaaaaccaaaacaggtgcaggcgctgttgccggtgctgtgccaggcccacggcttgaccccggagcaggtggtggccatcgccagccacgaattctgttgatcgaagaaatgttcttcttggcttaggaggtctttatggtgttgctaatgctataccattagcagcatcggctactcctataccatcccctgatctcaaaactgtggtagagccaccatatcggatggtccactagtaccctatacttgttgccccctcctatgccaactaacttttgacaccatttccatattacaagttcccttctangactaaacctccgtatccgtcccctgctcatgctgttgatggaggagtatattgctaagtataatttggccataagtcgaatgaaagatcttgataagacagaccc

SEQ ID NO: 1917 - DNA, 571 bp, Artificial
  Mutation introduced by TALE nuclease pair POT33_T02 within a POT33 allele
caagtgtgtgcaatagtagttctactactacaactctcaaaactcctttcatttcatccaatacttctttaggttccactcctaagccctctcaacttttcctccatggaaaacgtaacaaaactttcaaagtctcttgcaaagtttctaatagtggtgaccaaaaccaaaacaaccgccgctgccaagttcgagagacagcacatggacagcatcgatatcgccgatctacgcaaacgaattctgttgatcgaagaaatgttcttcttggcttaggaggtctttatggtgttgctaatgctataccattagcagcatcggctactcctataccatccccctgatctcaaaactttgtgggtaggagcccaaccatatcggatgggtccactagtaccctatacttgttgccccctcctatgccaactaactttgacaccattccatattacaagttcccttctatgactaaactccgtatccgtcccctgctcatgctgttgatgaggagtatattgctaagtataatttggccataagtcgaattgaaagatcttgataagacagaccc

SEQ ID NO: 1918 - DNA, 577 bp, Artificial
  Mutation introduced by TALE nuclease pair POT33_T02 within a POT33 allele
caagtgtgtgcaatagtagttctactactacaactctcaaaactcctttcatttcatccaatacttctttaggttccactcctaagccctctcaacttttcctccatggaaaacgtaacaaaactttcaaagtctcttgcaaagtttctaatagtggtgaccaaaaccaaaacaaccgccgctgccaagttcgagagacagcacatggacagcatcgatatcgccgatctacgcaaacgaattctgttgatcgaagaaatgttcttcttggcttaggaggtctttatggtgttgctaatgctataccattagcagcatcggctactcctataccatcccctgatctcaaaacttgtggtagagccaccatatcggatggtccactagtaccctatacttgttgcccctcctatgccaactaactttgacaccattccatattacaagttcccttctatgactaaactccgtatccgtcccctgctcatgctgttgatgaggagtatattgctaagtataatttggccataagtcgaatgaaagatcttgataagacagaccctttaaaccctcttgg

SEQ ID NO: 1919 - DNA, 601 bp, Artificial
  Mutation introduced by TALE nuclease pair POT33_T02 within a POT33 allele
caagtgtgtgcaatagtagttctactactacaactctcaaaactcctttcatttcatccaatacttctttaggttccactcctaagccctctcaacttttcctccatggaaaacgtaacaaaactttcaaagtctcttgcaaagtttctaatagtggtgaccaaaaccaaaacagagccactcagccgcgggtttctggagtttaatgagctaagcacatacgtcagaaaccattattgcgcgttcaaaagtcggagccactcagccgcgggtttctggagttaaaacgaattctgttgatcgaagaaatgttcttcttggcttaggaggtctttatggtgttgctaatgctataccattagcagcatcggctactcctataccatccctgatctcaaaacttgtggtagagccaccatatcggatggtccactagtaccctataccttgttgccccctcctatgccaactaactttgacaccattccatattaacaagttcccttctatgactaaactccgtatccgtcccctgctcatgctgttgatgaggagtatattgctaagtataatttggccataagtcgaatgaaagatcttg

SEQ ID NO: 1920 - DNA, 545 bp, Artificial
  Mutation introduced by TALE nuclease pair POT33_T02 within a POT33 allele
caagtgtgtgcaatagtagttctactactacaactctcaaaactcctttcatttcatccaatacttcttttaggttccactcctaagccctctcaacttttcctccatggaaaacgtaacaaaactttcaaagtctcttgcaaagtttctaatagtggtgaccaaaaccaaaacaggtgcaggcgctgttgccggtgctgtgccaggcccacggcttgaccccggagcaggtggtggccatcgccagccacgaattctgttgatcgaagaaatgttcttcttggcttaggaggtctttatggtgttgctaatgctataccattagcagcatcggctactcctataccatcccctgatctcaaaacttgtggtagagccaccatatcggatgggtccactagtaccctatacttgttgccccctcctatgccaactaactttgacaccatttccatattacaagttcccttctatgactaaactccgtatccgtcccctgctcatgctgttgatgaggagtatattgctaagtataatttggccat

SEQ ID NO: 1921 - DNA, 562 bp, Artificial
  Mutation introduced by TALE nuclease pair POT33_T02 within a POT33 allele
caagtgtgtgcaatagtagttctactactacaactctcaaaactcctttcatttcatccaatacttctttaggttccactcctaagcccctctcaacttttcctccatggaaaacgtaacaaaactttcaaagtctcttgcaaagtttctaatagtggtgaccaaaaccaaaaaccccatctcataaataacgtcatgcattacatgttaattattacatgcttaacgtaattcaaaaacgaattctgttgatcgaagaaatgttcttcttggcttaggaggtctttatggtgttgctaatgctataccattagcagcatcggctactcctataccatcccctgatctcaaaacttgtggtagagccaccatatcggatggtccactagtaccctatacttgttgccccctcctatgccaactaactttgacaccattccatattacaagttcccttctatgactaaactccgtatccgtcccctgctcatgctgttgatgaggagtatattgctaagtataatttggccataagtcgaatgaaagatcttgataagacaga

SEQ ID NO: 1922 - DNA, 565 bp, Artificial
  Mutation introduced by TALE nuclease pair POT33_T02 within a POT33 allele
aaagtgtgtgcaatagtagttctactactacaactctcaaaactcctttcatttcatccaatacttctttaggttccactcctaagccctctcaacttttcctccatggaaaacgtaacaaaactttcaaagtctcttgcaaagtttctaatagtggtgaccaaaaccaaaacaaacaagcaggcgctggagacggtccagcggctgttgccggtgctgtgccaggcccaaaacgaattctgttgatcgaagaaatgttcttcttggcttaggaggtctttatggtgttgctaatgctataccattagcagcatcggctactcctataccatcccctgatctcaaaacttgtggtagagccaccatatcggatggtccactagtaccctatacttgttgccccctcctatgccaactaactttgacaccattccatattacaagttcccttctatgactaaactccgtatccgtcccctgctcatgctgttgatgaggagtatattgctaagtataatttggccataagtcgaatgaaagatcttgataagacagaccctttaaa

SEQ ID NO: 1923 - DNA, 591 bp, Artificial
  Mutation introduced by TALE nuclease pair POT33_T02 within a POT33 allele
caagtgtgtgcaatagtagttctactactacaactctcaaaactcctttcatttcatccaatacttctttaggttccactcctaagcccctctcaacttttcctccatggaaaacgtaacaaaactttcaaagtctcttgcaaagtttctaatagtggtgaccaaaaccaaaacaggtgcaggcgctgttgccggtgctgtgccaggcccacggcttgaccccggagcaggtggtggccatcgccagccacgaattctgttgatcgaagaaatgttcttcttggcttaggaggtctttatggtgttgctaatgctataccattagcagcatcggctactcctataccatcccctgatctcaaaactgtggtagagccaccatatcggatggtccactagtaccctatacttgttgccccctcctatgccaactaactttgacaccattccatattacaagttcccttctatgactaaactccgtatccgtcccctgctcatgctgttgatgaggagtatattgctaagtataatttggcccataagtcgaatgaaagatcttgataagacagaccctttaaaccctcttgg

SEQ ID NO: 1924 - DNA, 545 bp, Artificial; identical to SEQ ID NO: 1804
  Mutation introduced by TALE nuclease pair POT33_T02 within a POT33 allele

SEQ ID NO: 1925 - DNA, 588 bp, Artificial
  Mutation introduced by TALE nuclease pair POT33_T02 within a POT33 allele
caagtgtgtgcaatagtagttctactactacaactctcaaaactcctttcatttcatccaatacttctttaggttccactcctaagccctctcaacttttcctccatggaaaacgtaacaaaactttcaaagtctcttgcaaagtttctaatagtggtgaccaaaaccaaaacaggtgcaggcgctgttgccggtgctgtgccaggcccacggcttgaccccggagcaggtggtggccatcgccagccacgaattctgttgatcgaagaaatgttcttcttggcttaggaggtctttatggtgttgctaatgctataccattagcagcatcggctactcctataccatcccctgatctcaaaacttgtggtagagccaccatatcggatggtccactagtaccctatacttgttgcccctcctatgccaactaactttgacaccattccatattacaagttcccttctatgactaaactccgtatccgtcccctgctcatgctgttgatgaggagtatattgctaagtataatttggccataagtcgaatgaagatcttgataagacagaccctttaaaccctcttgg

SEQ ID NO: 1926 - DNA, 537 bp, Artificial
  Mutation introduced by TALE nuclease pair POT33_T02 within a POT33 allele
caagtgtgtgcaatagtagttctactactacaactctcaaaactcctttcatttcatccaatacttctttaggttccactcctaagccctctcaacttttcctccatggaaaacgtaacaaaactttcaaagtctcttgcaaagtttctaatagtggtgaccaaaaccaaaaaccccatctcataaataacgtcatgcattacatgttaattattacatgcttaacgtaattcaaaaacgaattctgttgatcgaagaaatgttcttcttggcttaggaggtctttatggtgttgctaatgctataccattagcagcatcggctactcctataccatcccctgatctcaaaacttgtggtagagccaccatatcggatggtccactagtaccctatacttgttgccccctcctatgccaactaactttgacaccattccatattacaagttcccttctatgactaaactccgtatccgtcccctgctcatgctgttgatgaggagtatattgctaagtataatttggccataagtcg

SEQ ID NO: 1927 - DNA, 493 bp, Artificial
  Mutation introduced by TALE nuclease pair POT33_T02 within a POT33 allele
caagtgtgtgcaatagtagttctactactacaactctcaaaactcctttcatttcatccaatacttctttaggttccactcctaagcccctctcaacttttcctccatggaaaacgtaacaaaactttcaaagtctcttgcaaagtttctaatagtggtgaccaaaaccaaaacagagccactcagccgcgggtttctggagtttaatgagctaagcacatacgtcagaaaccattattgcgcgttcaaaatgtcggagccactcagccgcgggtttctggagttaaaacgaattctgttgatcgaagaaatgttcttcttggcttaggaggtctttatggtgttgctaatgctataccattagcagcatcggctactcctataccatccctgatctcaaaacttgtggtagagccaccatatcggatggtccactagtacctatacttgttgccccctcctatgccaactaactttgacaccattccatatt

SEQ ID NO: 1928 - DNA, 551 bp, Artificial
  Mutation introduced by TALE nuclease pair POT33_T02 within a POT33 allele
caagtttgtgcaatagtagttctactactacaactctcaaaactcctttcatttcatccaatacttctttaggttccactcctaagccctctcaacttttcctccatggaaaacgtaacaaaactttcaaagtctcttgcaaagtttctaatagtggtgaccaaaaccaaaacatgcaccatatgcggtgtgaaataccgcacagatgcgtaaggagaaaataccgcatcgaaacgaattctgttgatcgaagaaatgttcttcttggcttaggaggtctttatggtgttgctaatgctataccattagcagcatcggctactcctataccatcccctgatctcaaaacttgtggtagagccaccatatcggatggtccactagtaccctatacttgttgccccctcctatgccaactaactttgacaccattccatattacaagttcccttctatgactaactccgtatccgtcccctgctcatgctgttgatgaggagtatattgctaagtataatttggccataagtcgaatgaaagatcttgataag

SEQ ID NO: 1929 - DNA, 468 bp, Artificial
  Mutation introduced by TALE nuclease pair POT33_T02 within a POT33 allele
caagtgtgtgcaatagtagttctactactacaactctcaaaactcctttcatttcatccaatacttctttaggttccactcctaagccctctcaacttttcctccatggaaaacgtaacaaaactttcaaagtctcttgcaaagtttctaatagtggtgaccaaaaccaaaacagagccactcagccgcgggtttctggagtttaatgagctaagcacatacgtcagaaaccattattgcgcgttcaaaagtcggagccactcagccgcgggtttctggagttaaaacgaattctgttgatcgaagaaatgttcttcttggcttaggaggtctttatggtgttgctaatgctataccattagcagcatcggctactcctataccatccctgatctcaaaacttgtggtagagccaccatatcggatggtccactagtacctatacttgttgccccctcctatgccaac

SEQ ID NO: 1930 - DNA, 438 bp, Artificial
  Mutation introduced by TALE nuclease pair POT33_T02 within a POT33 allele
  misc_feature (333): n is a or c or t or g
caagtgtgtgcaatagtagttctactactacaactctcaaaactcctttcatttcatccaatacttctttaggttccactcctaagccctctcaacttttcctccatggaaaacgtaacaaaactttcaaagtctcttgcaaagtttctaatagtggtgaccaaaaccaaaacaggtgcaggcgctgttgcccggtgctgtgccaggccccacgggcttgacccccggagcagggtggtgggccatcgccagccacgaattctgttgatgaagaaatgttcttcttggcttaggaggtctttatggtgttgctaatgctataccattagcagnatcggctactcctataccatcccctgatccaaaactgtggtagagccaccatatcgggatgggtccactagtaccctatacttgttgccccctcctatgccaact

SEQ ID NO: 1931 - DNA, 528 bp, Artificial; identical to SEQ ID NO: 1820
  Mutation introduced by TALE nuclease pair POT33_T02 within a POT33 allele

SEQ ID NO: 1932 - DNA, 552 bp, Artificial
  Mutation introduced by TALE nuclease pair POT33_T02 within a POT33 allele
caagtttgtgcaatagtagttctactactacaactctcaaaactcctttcatttcatccaatacttctttaggttccactcctaagccctctcaacttttcctccatggaaaacgtaacaaaactttcaaagtctcttgcaaagtttctaatagtggtgaccaaaaccaaaacatgcaccatatgcggtgtgaaataccgcacagatgcgtaaggagaaaataccgcatcgaaacgaattctgttgatcgaagaaatgttcttcttggcttaggaggtctttatggtgttgctaatgctataccattagcagcatcggctactcctataccatcccctgatctcaaaacttgtggtagagccaccatatcggatggtccactagtaccctatacttgttgccccctcctatgccaactaactttgacaccattccatattacaagttcccttctatgactaaactccgtatccgtcccctgctcatgctgttgatgaggagtatattgctaagtataatttggccataagtcgaatgaaagatcttgataag

SEQ ID NO: 1933 - DNA, 541 bp, Artificial
  Mutation introduced by TALE nuclease pair POT33_T02 within a POT33 allele
caagtgtgtgcaatagtagttctactactacaactctcaaaactcctttcatttcatccaatacttctttaggttccactcctaagcccctctcaacttttcctccatggaaaacgtaacaaaactttcaaagtctcttgcaaagtttctaatagtggtgaccaaaaccaaaacaggtgcaggcgctgttgccggtgctgtgccaggcccacggcttgaccccggagcaggtggtggccatcgccagccacgaattctgttgatcgaagaaatgttcttcttggcttaggaggtctttatggtgttgctaatgctataccattagcagcatcggctactcctataccatcccctgatctcaaaacttgtggtagagccaccatatcggatggtccactagtaccctatacttgttgccccctcctatgccaactaacttttgacaccatttccatattacaagttcccttctatgactaaactccgtatccgtcccctgctcatgctgttgatgaggagtatattgctaagtataatttgg

SEQ ID NO: 1934 - DNA, 590 bp, Artificial
  Mutation introduced by TALE nuclease pair POT33_T02 within a POT33 allele
caagtgtgtgcaatagtagttctactactacaactctcaaaactcctttcatttcatccaatacttctttaggttccactcctaagcccctctcaacttttcctccatggaaaacgtaacaaaactttcaaagtctcttgcaaagtttctaatagtggtgaccaaaaccaaaacaggtgcaggcgctgttgccggtgctgtgccaggcccacggcttgaccccggagcaggtggtggccatcgccagccacgaattctgttgatcgaagaaatgttcttcttggcttaggaggtctttatggtgttgctaatgctataccattagcagcatcggctactcctataccatcccctgatctcaaaactgtggtagagccaccatatcggatggtccactagtaccctatacttgttgccccctcctatgccaactaactttgacaccattccatattacaagttcccttctatgactaaactccgtatccgtcccctgctcatgctgttgatgaggagtatattgctaagtataatttggccataagtcgaatgaaagatcttgataagacagaccctttaaaccctcttgg

SEQ ID NO: 1935 - DNA, 574 bp, Artificial
  Mutation introduced by TALE nuclease pair POT33_T02 within a POT33 allele
caagtgtgtgcaatagtagttctactactacaactctcaaaactcctttcatttcatccaatacttctttaggttccactcctaagcccctctcaacttttcctccatggaaaacgtaacaaaactttcaaagtctcttgcaaagtttctaatagtggtgaccaaaaccaaaacaggtgcaggcgctgttgccggtgctgtgccaggcccacggcttgaccccggagcaggtggtggccatcgccagccacgaattctgttgatcgaagaaatgttcttcttggcttaggaggtctttatggtgttgctaatgctataccattagcagcatcggctactcctataccatcccctgatctcaaaactgtggtagagccaccatatcggatgggtccactagtaccctatacttgttgccccctcctatgccaactaacttttgacaccattccatattacaagttcccttctatgactaaactccgtatccgtcccctgctcatgctgttgatgaggagtatattgctaagtataatttggccataagtcgaatgaaagatcttgataagacaga

SEQ ID NO: 1936 - DNA, 578 bp, Artificial
  Mutation introduced by TALE nuclease pair POT33_T02 within a POT33 allele
caagtgtgtgcaatagtagttctactactacaactctcaaaactcctttcatttcatccaatacttctttaggttccactcctaagcccctctcaacttttcctccatggaaaacgtaacaaaactttcaaagtctcttgcaaagtttctaatagtggtgaccaaaaccaaaacctagatccttttaaattaaaatgaagttttaaatcaatctaaagtatatatgagtaaacttggtctgacaaaacgaattctgttgatcgaagaatgttcttcttggcttaggaggtctttatggtgttgctaatgctataccattagcagcatcggctactcctataccatcccctgatctcaaaacttgtggtagagccaccatatcggatggtccactagtaccctatacttgttgccccctcctatgccaactaactttgacaccattccatattacaagttcccttctatgactaactccgtatccgtcccctgctcatgctgttgatgaggagtatattgctaagtataatttggccataagtcgaatgaaaggatcttgataagacagaccctttaaa

SEQ ID NO: 1937 - DNA, 494 bp, Artificial
  Mutation introduced by TALE nuclease pair POT33_T02 within a POT33 allele
caagtgtgtgcaatagtagttctactactacaactctcaaaactcctttcatttcatccaatacttctttaggttccactcctaagcccctctcaacttttcctccatggaaaacgtaacaaaactttcaaagtctcttgcaaagtttctaatagtggtgaccaaaaccaaaacagagccactcagccgcgggtttctggagtttaatgagctaagcacatacgtcagaaaccattattgcgcgttcaaaagtcggagccactcagccgcgggtttctggagttaaaacgaattctgttgatcgaagaaatgttcttcttggcttaggaggtctttatggtgttgctaatgctataccattagcagcatcggctactcctataccatccctgatctcaaaacttgtggtagagccaccatatcggatggtccactagtaccctatacttgttgcccccatcctatgccaactaactttgacaccattccatatt

SEQ ID NO: 1938 - DNA, 577 bp, Artificial
  Mutation introduced by TALE nuclease pair POT33_T02 within a POT33 allele
caagtgtgtgcaatagtagttctactactacaactctcaaaactcctttcatttcatccaatacttctttaggttccactcctaagcccctctcaacttttcctccatggaaaacgtaacaaaactttcaaagtctcttgcaaagtttctaatagtggtgaccaaaaccaaaacaggtgcaggcgctgttgccggtgctgtgccaggcccacggcttgaccccggagcaggtggtggccatcgccagccacgaattctgttgatcgaagaaatgttcttcttggcttaggaggtctttatggtgttgctaatgctataccattagcagcatcggctactcctataccatccccttgatctcaaaacttgtggtagagccaccatatcggatggtccactagtaccctatacttgttgccccctcctatgccaactaacttttgacaccattccatattacaagttcccttctatgactaaactccgtatccgtcccctgctatgctgttgatgaggagtatattgctaagtataatttggccataagtcgaatgaaagatcttgataagacagaccc

SEQ ID NO: 1939 - DNA, 548 bp, Artificial
  Mutation introduced by TALE nuclease pair POT33_T02 within a POT33 allele
caagtgtgtgcaatagtagttctactactacaactctcaaaactcctttcatttcatccaatacttctttaggttccactcctaagcccctctcaacttttcctccatggaaaacgtaacaaaactttcaaagtctcttgcaaagtttctaatagtggtgaccaaaaccaaaacaggtgcaggcgctgttgccggtgctgtgccaggcccacggcttgaccccggagcaggtggtggccatcgccagccacgaattctgttgatcgaagaaatgttcttcttggcttaggaggtctttatggtgttgctaatgctataccattagcagcatcggctactcctataccatcccctgatctcaaaactgtggtagagccaccatatcggatggtccactagtaccctatacttgttgccccctcctatgccaactaactttgacaccattccatattacaagttcccttctatgactaaactccgtatccgtcccctgctcatgctgttgatgaggagtatattgctaagtataatttggccataagtcg

SEQ ID NO: 1940 - DNA, 501 bp, Artificial
  Mutation introduced by TALE nuclease pair POT33_T02 within a POT33 allele
  misc_feature (274): n is a or c or t or g
caagtgtgtgcaatagtagttctactactacaactctcaaaactcctttcatttcatccaatacttctttaggttccactcctaagccctctcaacttttcctccatggaaaacgtaacaaaactttcaaagtctcttgcaaagtttctaatagtggtgaccaaaaccaatgcgcccacgaggcactggtcggccacgggtttacacacgcgcacatcgttgcgttaagccaacacccggcagcgttagggaccgtcgctgtcaagtatcaggncattaacgaattctgttgatcgaagaaaatgttcttcttggcttaggaggtctttatggtgttgctaatgtataccattagcagcatcggctactcctataccatcccctgatctcaaaacttgtggtagagccaccatatcggatggtccactagtaccctatacttgttgcccccctcctatgcccaactaacctttgacaccattccatattacaagttccctt

SEQ ID NO: 1941 - DNA, 542 bp, Artificial
  Mutation introduced by TALE nuclease pair POT33_T02 within a POT33 allele
caagtgtgtgcaatagtagttctactactacaactctcaaaactcctttcatttcatccaatacttctttaggttccactcctaagcccctctcaacttttcctccatggaaaacgtaacaaaactttcaaagtctcttgcaaagtttctaatagtggtgaccaaaaccaaaacatttgatcttctcctgttgctgctggctgtagccgagcgtgcgtagatcacgaattctgttgatcgaagaaatgttcttcttggcttaggaggtctttatggtgttgctaatgctataccattagcagcatcggctactcctataccatcccctgatctcaaaacttgtggtagagccaccatatcggatggtccactagtaccctatacttgttgccccctcctatgccaactaactttgacaccattccatattacaagttcccttctatgactaaactccgtatccgtcccctgctcatgctgttgatgaggagtatattgctaagtataatttggccataagtcgaatgaaagatcttgataag

SEQ ID NO: 1942 - DNA, 548 bp, Artificial
  Mutation introduced by TALE nuclease pair POT33_T02 within a POT33 allele
caagtgtgtgcaatagtagttctactactacaactctcaaaactcctttcatttcatccaatacttctttaggttccactcctaagccctctcaacttttcctccatggaaaacgtaacaaaactttcaaagtctcttgcaaagtttctaatagtggtgaccaaaaccaaaacattgccggtgctgtgccaaggcccacggcttgaaacgaattctgttgatcgaagaaatgttcttcttggcttaggaggtctttatggtgttgctaatgctataccattagcagcattcggctactcctataccatcccctgatctcaaaacttgtggtagagccaccatatcggatggtccactagtaccctatacttgttgccccctcctatgccaactaactttgacaccattccatattacaagttcccttctatgactaaactccgtatccgtcccctgctcatgctgttgatgaggagtatattgctaagtataatttggccataagtcgaatgaaagatcttgataagacagaccctttaaaccctctt

SEQ ID NO: 1943 - DNA, 567 bp, Artificial
  Mutation introduced by TALE nuclease pair POT33_T02 within a POT33 allele
caagtttgtgcaatagtagttctactactacaactctcaaaactcctttcatttcatccaatacttctttaggttccactcctaagcccctctcaacttttcctccatggaaaacgtaacaaaactttcaaagtctcttgcaaagtttctaatagtggtgaccaaaaccaaaacatgcaccatatgcggtgtgaaataccgcacagatgcgtaaggagaaaataccgcatcgaaacgaattctgttgatcgaagaaatgttcttcttggcttaggaggtctttatggtgttgctaatgctataccattagcagcatcggctactcctataccatcccctgatctcaaaacttgtggtagagccaccatatcggatggtccactagtaccctatacttgttgccccctcctatgccaactaactttgacaccattccatattacaagttcccttctatgactaaactccgtatccgtcccctgctcatgctgttgatgaggagtatattgctaagtataatttggccataagtcgaatgaaagatcttgataagacagaccctttaaa

SEQ ID NO: 1944 - DNA, 548 bp, Artificial
  Mutation introduced by TALE nuclease pair POT33_T02 within a POT33 allele
caagtgtgtgcaatagtagttctactactacaactctcaaaactcctttcatttcatccaatacttctttaggttccactcctaagcccctctcaacttttcctccatggaaaacgtaacaaaactttcaaagtctcttgcaaagtttctaatagtggtgaccaaaaccaatgcgccacgaggcactggtcggccacgggtttacacacgcgcacatcgttgcgttaagcccaacacccggcagcgttagggaccgtcgctgtcaagtatcaggacattaacgaattctgttgatcgaagaaatgttcttcttggcttaggaggtcttatggtgttgctaatgctataccattagcagcatcggctactcctataccatcccctgatctcaaaacttgtggtagagccacccatatcggatggtccactagtaccctatacttgttgcccccctcctatgccaactaactttgacaccattccatattacaagttcccttctatgactaaactccgtatccgtcccctgctcatgctgttgatgagga

SEQ ID NO: 1945 - DNA, 574 bp, Artificial
  Mutation introduced by TALE nuclease pair POT33_T02 within a POT33 allele
caagtgtgtgcaatagtagttctactactacaactctcaaaactcctttcatttcatccaatacttctttaggttccactcctaagccctctcaacttttcctccatggaaaacgtaacaaaactttcaaagtctcttgcaaagtttctaatagtggtgaccaaaaccaaaacaggtgcaggcgctgttgccggtgctgtgccaggcccacggcttgaccccggagcaggtggtggccatcgccagccacgaattctgttgatcgaagaaatgttcttcttggcttaggaggtctttatggtgttgctaatgctataccattagcagcatcggctactcctataccatcccctgatctcaaaacttgtggtagagccaccatatcggatggtccactagtaccctatacttgttgccccctcctatgccaactaacttttgacaccattccatattacaagttcccttctatgactaaactccgtatccgtcccctgctcatgctgttgatgaggagtatattgctaaagtataatttggccataagtcgaatgaaagatcttgataagacaga

SEQ ID NO: 1946 - DNA, 621 bp, Artificial
  Mutation introduced by TALE nuclease pair POT33_T02 within a POT33 allele
  misc_feature (403): n is a or c or t or g
caagtgtgtgcaatagtagttctactactacaactctcaaaactcctttcatttcatccaatacttctttaggttccactcctaagccctctcaacttttcctccatggaaaacgtaacaaaactttcaaagtctcttgcaaagtttctaatagtggtgaccaaaaccaaaacagagccactcagccgcgggtttctggagtttaatgagctaagcacatacgtcagaaaccattattgcgcgttcaaaagtcggagccactcagccgcgggtttctggagttaaaacgaattctgttgatcgaagaaatgttcttcttggcttaggaggtctttatggtgttgctaatgctataccattagcagcatcggctactcctactaccatcccctgatctcaaaanttgtggtagagccaccatatcggatggtccactagtaccctataccttgttgccccctcctatgccaactaactttgacaccattccatattacaagttcccttctatgactaaactccgtatccgtcccctgctcatgctgttgatgaggagtatattgctaagtataatttggccataagtcgaatgaaagatcttgataagacagaccctttaaa

SEQ ID NO: 1947 - DNA, 544 bp, Artificial; identical to SEQ ID NO: 1844
  Mutation introduced by TALE nuclease pair POT33_T02 within a POT33 allele

SEQ ID NO: 1948 - DNA, 566 bp, Artificial
  Mutation introduced by TALE nuclease pair POT33_T02 within a POT33 allele
caagtgtgtgcaatagtagttctactactacaactctcaaaactcctttcatttcatccaatacttctttaggttccactcctaagcccctctcaacttttcctccatggaaaacgtaacaaaactttcaaagtctcttgcaaagtttctaatagtggtgaccaaaaccaaaacaggtgcaggcgctgttgccggtgctgtgccaggcccacggcttgaccccggagcaggtggtggccatcgccagccacgaattctgttgatcgaagaaatgttcttcttggcttaggaggtctttatggtgttgctaatgctataccattagcagcatcggctactcctataccatcccctgatctcaaaactgtggtagagccaccatatcggatgggtccactagtaccctatacttgttgccccctcctatgccaactaactttgacaccattccatattacaagttcccttctatgactaaactccgtatccgtcccctgctcatgctgtgatgaggagtatattgctaagtataatttggccataagtcgaatgaaagatcttgataa

SEQ ID NO: 1949 - DNA, 578 bp, Artificial
  Mutation introduced by TALE nuclease pair POT33_T02 within a POT33 allele
caagtgtgtgcaatagtagttctactactacaactctcaaaactcctttcatttcatccaatacttctttaggttccactcctaagcccctctcaacttttcctccatggaaaacgtaacaaaactttcaaagtctcttgcaaagtttctaatagtggtgaccaaaaccaaaacaaccgccgctgccaagttcgagagacagcacatggacagcatcgatatcgccgatctacgcaaacgaattctgttgatcgaagaaatgttcttcttggcttaggaggtctttatggtgttgctaatgctataccattagcagcatcggctactcctataccatcccctgatctcaaaacttgtggtagagccaccatatcggatggtccactagtaccctatacttgttgcccctcctatgccaactaactttgacaccattccatattacaagttcccttctatgactaaactccgtatccgtcccctgctcatgctgttgatgaggagtatattgctaagtataatttggccataagtcgaatgaaagatcttgataagacagaccctttaaaccctcttgg

SEQ ID NO: 1950 - DNA, 591 bp, Artificial
  Mutation introduced by TALE nuclease pair POT33_T02 within a POT33 allele
caagtgtgtgcaatagtagttctactactacaactctcaaaactcctttcatttcatccaatacttctttaggttccactcctaagccctctcaacttttcctccatggaaaacgtaacaaaactttcaaagtctcttgcaaagtttctaatagtggtgaccaaaaccaaaacaggtgcaggcgctgttgccggtgctgtgccaggcccacggcttgaccccggagcaggtggtggccatcgccagccacgaattctgttgatcgaagaaatgttcttcttggcttaggaggtctttatggtgttgctaatgctataccattagcagcatcggctactcctataccatcccctgatctcaaaacttgtggtagagccaccatatcggatggtccactagtaccctatacttgttgccccctcctatgccaactaacttttgacaccatttccatattacaagttcccttctatgactaaactccgtatccgtcccctgctcatgctgttgatgaggagtatattgctaagtataatttggccataagtcgaatgaagatcttgataagacagaccctttaaaccctcttgg

SEQ ID NO: 1951 - DNA, 615 bp, Artificial
  Mutation introduced by TALE nuclease pair POT33_T02 within a POT33 allele
caagtgtgtgcaatagtagttctactactacaactctcaaaactcctttcatttcatccaatacttctttaggttccactcctaagcccctctcaacttttcctccatggaaaacgtaacaaaactttcaaagtctcttgcaaagtttctaatagtggtgaccaaaaccaaaacattccatcgccagctggggggtcaagccgtgggcctggcacagcaccgggcaacagcgcctgcaccgtctccagcgcctgcttgccaccattattgctggcgatggccaccacctgctccggggtcaagttgagcggggcttgaaacgaattctgttgatcgaagaaatgttcttcttggcttaggaggtctttatggtgttgctaatgctataccattagcagcatcggctactcctataccatcccctgatctcaaaacttgtggtagagccaccatatcggatggtccactagtaccctatacttgttgccccctcctatgccaactaactttgacaccattccatattacaagttcccttctatgactaaactccgtatccgtcccctgctcatgctgttgatgaggagtatattgctaagtataatttggccataa

SEQ ID NO: 1952 - DNA, 544 bp, Artificial
  Mutation introduced by TALE nuclease pair POT33_T02 within a POT33 allele
caagtgtgtgcaatagtagttctactactacaactctcaaaactcctttcatttcatccaatacttctttaggttccactcctaagcccctctcaacttttcctccatggaaaacgtaacaaaactttcaaagtctcttgcaaagtttctaatagtggtgaccaaaaccaaaacaggtgcaggcgctgttgccggtgctgtgccaggcccacggcttgaccccggagcaggtggtggccatcgccagccacgaattctgttgatcgaagaaatgttcttcttggcttaggaggtctttatggtgttgctaatgctataccattagcagcatcggctactcctataccatcccctgatctcaaaacttgtggtagagccaccatatcggatgggtcccactagtaccctatacttgttgccccctcctatgccaactaacttttgacaccatttccatatttacaagttcccttctatgactaaactccgtatccgtcccctgctcatgctgttgatgaggagtatattgctaagtataatttgg

SEQ ID NO: 1953 - DNA, 463 bp, Artificial
  Mutation introduced by TALE nuclease pair POT33_T02 within a POT33 allele
caagtgtgtgcaatagtagttctactactacaactctcaaaactcctttcatttcatccaatacttctttaggttccactcctaagccctctcaacttttcctccatggaaaacgtaacaaaactttcaaagtctcttgcaaagtttctaatagtggtgaccaaaaccaaaacattgatatcgccgatctacgcacgctcggctacagccagcagcaacaggagaagatcaaacgaattctgttgatcgaagaaatgttcttcttggcttaggaggtctttatggtgttgctaatgctataccattagcagcatcggctactcctataccatcccctgatctcaaaacttgtggtagagccaccatatcggatggtccactagtaccctatacttgttgccccctcctatgccaactaactttgacaccatttccatattacaagttcccttctatgactaaa

SEQ ID NO: 1954 - DNA, 506 bp, Artificial
  Mutation introduced by TALE nuclease pair POT33_T03 within a POT33 allele
caagtgtgtgcaatagtagttctactactacaactctcaaaactcctttcatttcatccaatacttctttaggttccactcctaagccctctcaacttttcctccatggaaaacgtaacaaaactttcaaagtctcttgcaaagtttctaatagtggtgaccaaaaccaaaacattgaaacgaattctgttgatcgaagaaatgttcttcttggcttaggaggtctttatggtgttgctaatgctataccattagcagcatcggctactcctataccatcccctgatctcaaaacttgtggtagagccaccatatcggatggtccactagtaccctatacttgttgcccccctcctcatgccaactaactttgtacaccattccatattcacaagttcccttccttatgactaaactccagtactccgtctcatgctgttgatgaggagtagtattgcttaatgatataattttgggccataagtcgaatgaaagatcttgataag

SEQ ID NO: 1955 - DNA, 446 bp, Artificial
  Mutation introduced by TALE nuclease pair POT33_T03 within a POT33 allele
caagtgtgtgcaatagtagttctactactacaactctcaaaactcctttcatttcatccaatacttctttaggttccactcctaagccctctcaacttttcctccatggaaaacgtaacaaaactttcaaagtctcttgcaaagtttctaatagtggtgaccaaaaccaaaacattgaaacgaattctgttgatcgaagaaatgttcttcttggcttaggaggtctttatggtgttgctaatgctataccattagcagcatcggctactcctataccatcccctgatctcaaaacttgtggtagagccaccatatcggatggtccactagtaccctatacttgttgcccccctcctcatgccaactaactttgtacaccacttccattattcacaagtttcccattccttatgactaaactccagaggcagtgatattgctaagtt

SEQ ID NO: 1956 - DNA, 469 bp, Artificial
  Mutation introduced by TALE nuclease pair POT33_T03 within a POT33 allele
caagtgtgtgcaatagtagttctactactacaactctcaaaactcctttcatttcatccaatacttctttaggttccactcctaagcccctctcaacttttcctccatggaaaacgtaacaaaactttcaaagtctcttgcaaagtttctaatagtggtgaccaaaaccaaaacattgaaacgaattctgttgatcgaagaaatgttcttcttggcttaggaggtctttatggtgttgctaatgctataccattagcagcatcggctactcctataccatcccctgatctcaaaacttgtggtagagccaccatatcggatggtccactagtaccctatacttgttgcccccctcctatgccaactaactttgacaccattccatattacaagctcatcttgttgatgaggagtatattgccaagtacaatttggcaattagtcgaatgaaagatcttgataagacaga

SEQ ID NO: 1957 - DNA, 481 bp, Artificial
  Mutation introduced by TALE nuclease pair POT33_T03 within a POT33 allele
caagtgtgtgcaatagtagttctactactacaactctcaaaactcctttcatttcatccaatacttctttaggttccactcctaagcccctctcaacttttcctccatggaaaacgtaacaaaactttcaaagtctcttgcaaagtttctaatagtggtgaccaaaaccaaaacattgaaacgaattctgttgatcgaagaaatgttcttcttggcttaggaggtctttatggtgttgctaatgctataccattagcagcatcggctactcctataccatcccctgatctcaaaacttgtggtagagccaccatatcggatggtccactagtaccctatacttgttgcccccctcctatgccaactaactttgacaccattccatattacaagttctgttgatgaggagtatattgctaagtataatttggccataagtcgaatgaaagatcttgataagacagaccctttaaaccctctt

SEQ ID NO: 1958 - DNA, 490 bp, Artificial
  Mutation introduced by TALE nuclease pair POT33_T03 within a POT33 allele
caagtgtgtgcaatagtagttctactactacaactctcaaaactcctttcatttcatccaatacttctttaggttccactcctaagcccctctcaacttttcctccatggaaaacgtaacaaaactttcaaagtctcttgcaaagtttctaatagtggtgaccaaaaccaaaacattgaaacgaattctgttgatcgaagaaatgttcttcttggcttaggaggtctttatggtgttgctaatgctataccattagcagcatcggctactcctataccatcccctgatctcaaaacttgtggtagagccaccatatcggatggtccactagtaccctatacttgttgcccccctcctatgccatcccttctatgactaaactccagtatccgtcctcatgctgttgatgaggagtatattgtctaagtataattttggccataagtcgaatgaaagatcttgataagacagaccctttaaaccctcttgg

SEQ ID NO: 1959 - DNA, 480 bp, Artificial
  Mutation introduced by TALE nuclease pair POT33_T03 within a POT33 allele
caagtgtgtgcaatagtagttctactactacaactctcaaaactcctttcatttcatccaatacttctttaggttccactcctaagcccctctcaacttttcctccatggaaaacgtaacaaaactttcaaagtctcttgcaaagtttctaatagtggtgaccaaaaccaaaacattgaaacgaattctgttgatcgaagaaatgttcttcttggcttaggaggtctttatggtgttgctaatgctataccattagcagcatcggctactcctataccatcccctgatctcaaaacttgtggtagagccaccatatcggatggtccactagtaccctatacttgttgcccccctcctatgccaactaactttgtacaccattccatgctcatgctgttgatgaggtagtatattgctaatgtataatttggccattgcaagtcgaatgaaagatcttgataagacagaccctttaaaccc

SEQ ID NO: 1960 - DNA, 467 bp, Artificial
  Mutation introduced by TALE nuclease pair POT33_T03 within a POT33 allele
caagtgtgtgcaatagtagttctactactacaactctcaaaactcctttcatttcatccaatacttctttaggttccactcctaagcccctctcaacttttcctccatggaaaacgtaacaaaactttcaaagtctcttgcaaagtttctaatagtggtgaccaaaaccaaaacattgaaacgaattctgttgatcgaagaaatgttcttcttggcttaggaggtctttatggtgttgctaatgctataccattagcagcatcggctactcctataccatcccctgatctcaaaacttgtggtagagccaccatatcggatggtccactagtaccctatacttgttgcccccctcctcatgccaacctaactttagtacaccacttccttgacggaggtatattgctaagtataatttggccataagtcgaatgaaagatcttgataagacagaccctttaaaccct

SEQ ID NO: 1961 - DNA, 450 bp, Artificial
  Mutation introduced by TALE nuclease pair POT33_T03 within a POT33 allele
caagtgtgtgcaatagtagttctactactacaactctcaaaactcctttcatttcatccaatacttctttaggttccactcctaagcccctctcaacttttcctccatggaaaacgtaacaaaactttcaaagtctcttgcaaagtttctaatagtggtgaccaaaaccaaaacattgaaacgaattctgttgatcgaagaaatgttcttcttggcttaggaggtctttatggtgttgctaatgctataccattagcagcatcggctactcctataccatcccctgatctcaaaacttgtggtagagccaccatatcggatggtccactagtaccctatacttgttgcccccctcctcatgccaactaactttagtacaccacttccattattcacaagtttcccattccttatgactaaactccagtactccgtccatctgcttgatgt

SEQ ID NO: 1962 - DNA, 480 bp, Artificial
  Mutation introduced by TALE nuclease pair POT33_T03 within a POT33 allele
caagtgtgtgcaatagtagttctactactacaactctcaaaactcctttcatttcatccaatacttctttaggttccactcctaagcccctctcaacttttcctccatggaaaacgtaacaaaactttcaaagtctcttgcaaagtttctaatagtggtgaccaaaaccaaaacattgaaacgaattctgttgatcgaagaaatgttcttcttggcttaggaggtctttatggtgttgctaatgctataccattagcagcatcggctactcctataccatcccctgatctcaaaacttgtggtagagccaccatatcggatggtccactagtaccctatacttgttgcccccctcctcatgccaactaactttagtacaccacttccatattcacaagttgctgttgatgaggagtatattgctaatgtataatttggaccattgcaaagtcgaatgaaagatcttgataagacagaccc

SEQ ID NO: 1963 - DNA, 517 bp, Artificial
  Mutation introduced by TALE nuclease pair POT33_T03 within a POT33 allele
caagtgtgtgcaatagtagttctactactacaactctcaaaactcctttcatttcatccaatacttctttaggttccactcctaagcccctctcaacttttcctccatggaaaacgtaacaaaactttcaaagtctcttgcaaagtttctaatagtggtgaccaaaaccaaaacattgaaacgaattctgttgatcgaagaaatgttcttcttggcttaggaggtctttatggtgttgctaatgctataccattagcagcatcggctactcctataccatcccctgatctcaaaacttgtggtagagccaccatatcggatggtccactagtaccctatacttgttgcccccctcctatgccaactaactttgacaccattccatattacaagttcccttctatgactaaactccgtatccgtccctcatgctgttgatgaggagtatattgctaagtataatttggccataagtcgaatgaaagatcttgataagacagaccctttaaaccctctt

SEQ ID NO: 1964 - DNA, 488 bp, Artificial
  Mutation introduced by TALE nuclease pair POT33_T03 within a POT33 allele
caagtgtgtgcaatagtagttctactactacaactctcaaaactcctttcatttcatccaatacttctttaggttccactcctaagcccctctcaacttttcctccatggaaaacgtaacaaaactttcaaagtctcatgcaaagtttctaatagtggtgaccaaaaccaaaacattgaaacgaattctgttgatcgaagaaatgttcttcttggcttaggaggtctttatggtgttgctaatgctataccattagcagcatcggctactcctataccatcccctgatctcaaaacttgtggtagagccaccatatcggatggtccactagtaccctatacttgttgcccccctcctatgccaactaactttgacaccattccatattacaagtctcatcttgttgatgaggagtatattgccaagtacaatttggcaattagtcgaatgaaagatcttgataagacagaccctttaaaccctcttgg

SEQ ID NO: 1965 - DNA, 482 bp, Artificial
  Mutation introduced by TALE nuclease pair POT33_T03 within a POT33 allele
caagtgtgtgcaatagtagttctactactacaactctcaaaactcctttcatttcatccaatacttctttaggttccactcctaagcccctctcaacttttcctccatggaaaacgtaacaaaactttcaaagtctcttgcaaagtttctaatagtggtgaccaaaaccaaaacattgaaacgaattctgttgatcgaagaaatgttcttcttggcttaggaggtctttatggtgttgctaatgctataccattagcagcatcggctactcctataccatcccctgatctcaaaacttgtggtagagccaccatatcggatggtccactagtaccctatacttgttgcccccctcctcatgccaactaactttgtacaccacttccattattcacaagtttcccttcctatgactaaactccagtactccgttgctgttgatgaggagtatattgctaagtataatttggccataagtcgaa

SEQ ID NO: 1966 - DNA, 521 bp, Artificial
  Mutation introduced by TALE nuclease pair POT33_T03 within a POT33 allele
caagtgtgtgcaatagtagttctactactacaactctcaaaactcctttcatttcatccaatacttctttaggttccactcctaagcccctctcaacttttcctccatggaaaacgtaacaaaactttcaaagtctcttgcaaagtttctaatagtggtgaccaaaaccaaaacattgaaacgaattctgttgatcgaagaaatgttcttcttggcttaggaggtctttatggtgttgctaatgctataccattagcagcatcggctactcctataccatcccctgatctcaaaacttgtggtagagccaccatatcggatggtccactagtaccctatacttgttgcccccctcctatgccaactaactttgtacaccacttccatattcacaagtttcccttcctatgactaaactccagtatccgtccgctgcttgatgtaggagtagtattgctaagtataatttggccataagtcgaatgaaagatcttgataagacagaccctttaaaccctctt

SEQ ID NO: 1967 - DNA, 438 bp, Artificial
  Mutation introduced by TALE nuclease pair POT33_T03 within a POT33 allele
caagtgtgtgcaatagtagttctactactacaactctcaaaactcctttcatttcatccaatacttctttaggttccactcctaagccctctcaacttttcctccatggaaaacgtaacaaaactttcaaagtctcttgcaaagtttctaatagtggtgaccaaaaccaaaacattgaaacgaattctgttgatcgaagaaatgttcttcttggcttaggaggtctttatggtgttgctaatgctataccattagcagcatcggctactcctataccatcccctgatctcaaaacttgtggtagagccaccatatcggatggtccactagtaccctatacttgttgcccccctcctcatgccaactaactttgtacaccacttccatatcacaagcttcaatgctgttgactgatggagtagtattgctaagttataa

SEQ ID NO: 1968 - DNA, 517 bp, Artificial
  Mutation introduced by TALE nuclease pair POT33_T03 within a POT33 allele
caagtgtgtgcaatagtagttctactactacaactctcaaaactcctttcatttcatccaatacttctttaggttccactcctaagcccctctcaacttttcctccatggaaaacgtaacaaaactttcaaagtctcttgcaaagtttctaatagtggtgaccaaaaccaaaacattgaaacgaattctgttgatcgaagaaatgttcttcttggcttaggaggtctttatggtgttgctaatgctataccattagcagcatcggctactcctataccatcccctgatctcaaaacttgtggtagagccaccatatcggatggtccactagtaccctatacttgttgcccccctcctatgccaactaactttgacaccattccatattacaagttcccttctatgactaaactccgtatccgtcgctcatgctgttgatgaggagtatattgctaagtataatttggccataagtcgaatgaaagatcttgataagacagaccctttaaaccctctt

SEQ ID NO: 1969 - DNA, 493 bp, Artificial
  Mutation introduced by TALE nuclease pair POT33_T03 within a POT33 allele
caagtgtgtgcaatagtagttctactactacaactcccaaaactcctttcatttcatccaatacttctttaggttccactcctaagcccctctcaacttttcctccatggaaaacgtaacaaaactttcaaagtctcatgcaaagtttctaatagtggtgaccaaaaccaaaacattgaaacgaattctgttgatcgaagaaatgttcttcttggcttaggaggtctttatggtgttgctaatgctataccattagcagcatcggctactcctataccatcccctgatctcaaaacttgtggtagagccaccatatcggatggtccactagtaccctatacttgttgcccccctcctatgccaactaactttgacaccattccatattacaagtttcccttcctatgactaaactccagtatccgtcatcttgttgattgaggagtatatttgccaagtacaatttggcaattagtcgaatgaaagatcttga

SEQ ID NO: 1970 - DNA, 511 bp, Artificial
  Mutation introduced by TALE nuclease pair POT33_T03 within a POT33 allele
caagtgtgtgcaatagtagttctactactacaactctcaaaactcctttcatttcatccaatacttctttaggttccactcctaagccctctcaacttttcctccatggaaaacgtaacaaaactttcaaagtctcttgcaaagtttctaatagtggtgaccaaaaccaaaacattgaaacgaattctgttgatcgaagaaatgttcttcttggcttaggaggtctttatggtgttgctaatgctataccattagcagcatcggctactcctataccatcccctgatctcaaaacttgtggtagagccaccatatcggatggtccactagtaccctatacttgttgcccccctcctatgccaactaactttgtacaccacttccatattcacaagtttcccttcctatgactaaactccagtactccgtcctcatgcctgttgatgaggagtagtattgctaagtataatttggccataagtcgaatgaaagatcttgataagacagaccc

SEQ ID NO: 1971 - DNA, 483 bp, Artificial
  Mutation introduced by TALE nuclease pair POT33_T03 within a POT33 allele
caagtgtgtgcaatagtagttctactactacaactctcaaaactcctttcatttcatccaatacttctttaggttccactcctaagcccctctcaacttttcctccatggaaaacgtaacaaaactttcaaagtctcttgcaaagtttctaatagtggtgaccaaaaccaaaacattgaaacgaattctgttgatcgaagaaatgttcttcttggcttaggaggtctttatggtgttgctaatgctataccattagcagcatcggctactcctataccatcccctgatctcaaaacttgtggtagagccaccatatcggatggtccactagtaccctatacttgttgcccccctcctatgccaactaactttgacaccattccatattacaatcatgctgttgatgaggagtatattgctaagtataatttggccataagtcgaatgaaagatcttgataagacagaccctttaaaccctctt

SEQ ID NO: 1972 - DNA, 481 bp, Artificial
  Mutation introduced by TALE nuclease pair POT33_T03 within a POT33 allele
caagtgtgtgcaatagtagttctactactacaactctcaaaactcctttcatttcatccaatacttctttaggttccactcctaagcccctctcaacttttcctccatggaaaacgtaacaaaactttcaaagtctcttgcaaagtttctaatagtggtgaccaaaaccaaaacattgaaacgaattctgttgatcgaagaaatgttcttcttggcttaggaggtctttatggtgttgctaatgctataccattagcagcatcggctactcctataccatcccctgatctcaaaacttgtggtagagccaccatatcggatggtccactagtaccctatacttgttgcccccctcctatgccaactaactttgacaccattccatattacaagttcccatgctgttgatgaggagtatattgctaagtataatttggccataatgtcgaatgaaagatcttgataagacagaccctttaaa

SEQ ID NO: 1973 - DNA, 470 bp, Artificial
  Mutation introduced by TALE nuclease pair POT33_T03 within a POT33 allele
caagtgtgtgcaatagtagttctactactacaactctcaaaactcctttcatttcatccaatacttctttaggttccactcctaagcccctctcaacttttcctccatggaaaacgtaacaaaactttcaaagtctcttgcaaagtttctaatagtggtgaccaaaaccaaaacattgaaacgaattctgttgatcgaagaaatgttcttcttggcttaggaggtctttatggtgttgctaatgctataccattagcagcatcggctactcctataccatcccctgatctcaaaacttgtggtagagccaccatatcggatggtccactagtaccctatacttgttgcccccctcctatgccaactaactttgtacaccattccatattcacaagtagtatattgctaagtataatttggccataatgctcgaatgaaagatcttgataagacagacccttttaaaccct

SEQ ID NO: 1974 - DNA, 420 bp, Artificial
  Mutation introduced by TALE nuclease pair POT33_T03 within a POT33 allele
caagtgtgtgcaatagtagttctactactacaactctcaaaactcctttcatttcatccaatacttctttaggttccactcctaagcccctctcaacttttcctccatggaaaacgtaacaaaactttcaaagtctcttgcaaagtttctaatagtggtgaccaaaaccaaaacattgaaacgaattctgttgatcgaagaaatgttcttcttggcttaggaggtctttatggtgttgctaatgctataccattagcagcatcggctactcctataccatcccctgatctcaaaacttgtggtagagccaccatatcggatggtccactagtaccctatacttgttagtatattgctaagtatatttggccataagtcgaatgaagatcttgataagacagaccctttaaaccctcttgg

SEQ ID NO: 1975 - DNA, 471 bp, Artificial
  Mutation introduced by TALE nuclease pair POT33_T03 within a POT33 allele
caagtgtgtgcaatagtagttctactactacaactctcaaaactcctttcatttcatccaatacttctttaggttccactcctaagcccctctcaacttttcctccatggaaaacgtaacaaaactttcaaagtctcttgcaaagtttctaatagtggtgaccaaaaccaaaacattgaaacgaattctgttgatcgaagaaatgttcttcttggcttaggaggtctttatggtgttgctaatgctataccattagcagcatcggctactcctataccatcccctgatctcaaaacttgtggtagagccaccatatcggatggtccactagtaccctatacttgttgcccccctcctatgccaactaactttgacaccattccatattacaagttcccttctatgactaaactccgtatccgattgtaagtataatttggccataagtcgaatgaaagatcttgataagac

SEQ ID NO: 1976 - DNA, 502 bp, Artificial
  Mutation introduced by TALE nuclease pair POT33_T03 within a POT33 allele
caagtgtgtgcaatagtagttctactactacaactctcaaaactcctttcatttcatccaatacttctttaggttccactcctaagcccctctcaacttttcctccatggaaaacgtaacaaaactttcaaagtctcttgcaaagtttctaatagtggtgaccaaaaccaaaacattgaaacgaattctgttgatcgaagaaatgttcttcttggcttaggaggtctttatggtgttgctaatgctataccattagcagcatcggctactcctataccatcccctgatctcaaaacttgtggtagagccaccatatcggatggtccactagtaccctatacttgttgcccccctcctatgccaactaactttgacaccattccatattacaagttcccttctatgactaaactccgtatccgtctcatgctgttgatgaggagtatattgctaagtataatttggccataagtcgaatgaaagatcttgataagacagaccc

SEQ ID NO: 1977 - DNA, 477 bp, Artificial
  Mutation introduced by TALE nuclease pair POT33_T03 within a POT33 allele
caagtgtgtgcaatagtagttctactactacaactctcaaaactcctttcatttcatccaatacttctttaggttccactcctaagcccctctcaacttttcctccatggaaaacgtaacaaaactttcaaagtctcttgcaaagtttctaatagtggtgaccaaaaccaaaacattgaaacgaattctgttgatcgaagaaatgttcttcttggcttaggaggtctttatggtgttgctaatgctataccattagcagcatcggctactcctataccatcccctgatctcaaaacttgtggtagagccaccatatcggatggtccactagtaccctatacttgttgcccccctcctatgccaactaactttgacaccattccagctcatgctgttgatgaggagtatattgctaagtataatttggccataagtcgaatgaaagatcttgataagacagaccctttaaaccctctt

SEQ ID NO: 1978 - DNA, 515 bp, Artificial
  Mutation introduced by TALE nuclease pair POT33_T03 within a POT33 allele
caagtgtgtgcaatagtagttctactactacaactctcaaaactcctttcatttcatccaatacttctttaggttccactcctaagccctctcaacttttcctccatggaaaacgtaacaaaactttcaaagtctcttgcaaagtttctaatagtggtgaccaaaaccaaaacattgaaacgaattctgttgatcgaagaaatgttcttcttggcttaggaggtctttatggtgttgctaatgctataccattagcagcatcggctactcctataccatcccctgatctcaaaacttgtggtagagccaccatatcggatggtccactagtaccctatacttgttgcccccctcctatgccaactaactttgtacaccattccatattcacaagttcccttcctatgactaaactccagtatctcatgctgttgatgtaggagtatattgctaagtataatttggccataagtcgaatgaaagatcttgataagacagaccctttaaaccctctt

SEQ ID NO: 1979 - DNA, 460 bp, Artificial
  Mutation introduced by TALE nuclease pair POT33_T03 within a POT33 allele
caagtgtgtgcaatagtagttctactactacaactctcaaaactcctttcatttcatccaatacttctttaggttccactcctaagcccctctcaacttttcctccatggaaaacgtaacaaaactttcaaagtctcttgcaaagtttctaatagtggtgaccaaaaccaaaacattgaaacgaattctgttgatcgaagaaatgttcttcttggcttaggaggtctttatggtgttgctaatgctataccattagcagcatcggctactcctataccatcccctgatctcaaaacttgtggtagagccaccatatcggatggtccactagtaccctatacttgttgcccccctcctcatgccaactaactttagtacaccacttccttgacggagtatattgctaagtataattttggccataagtcgaatgaaagatcttgataagacagaccctttt

SEQ ID NO: 1980 - DNA, 517 bp, Artificial
  Mutation introduced by TALE nuclease pair POT33_T03 within a POT33 allele
caagtgtgtgcaatagtagttctactactacaactctcaaaactcctttcatttcatccaatacttctttaggttccactcctaagccctctcaacttttcctccatggaaaacgtaacaaaactttcaaagtctcttgcaaagtttctaatagtggtgaccaaaaccaaaacattgaaacgaattctgttgatcgaagaaatgttcttcttggcttaggaggtctttatggtgttgctaatgctataccattagcagcatcggctactcctataccatcccctgatctcaaaacttgtggtagagccaccatatcggatggtccactagtaccctatacttgttgcccccctcctcatgccaactaactttgacaccattccatattcacaagttcccttctatgactaaactccgtatccgtcctcatgctgttgatgaggagtatattgctaagtataatttggccataagtcgaatgaaagatcttgataagacagaccctttaaaccctctt

SEQ ID NO: 1981 - DNA, 492 bp, Artificial
  Mutation introduced by TALE nuclease pair POT33_T03 within a POT33 allele
caagtgtgtgcaatagtagttctactactacaactctcaaaactcctttcatttcatccaatacttctttaggttccactcctaagccctctcaacttttcctccatggaaaacgtaacaaaactttcaaagtctcttgcaaagtttctaatagtggtgaccaaaaccaaaacattgaaacgaattctgttgatcgaagaaatgttcttcttggcttaggaggtctttatggtgttgctaatgctataccattagcagcatcggctactcctataccatcccctgatctcaaaacttgtggtagagccaccatatcggatggtccactagtaccctatacttgttgcccccctcctatgccaactaactttgacaccattccatattacaagttcccgctcatcttgttgatgaggagtatattgccaagtacaatttggcaattagtcgaatgaaagatcttgataagacagaccctttaaaccctcttgg

SEQ ID NO: 1982 - DNA, 506 bp, Artificial
  Mutation introduced by TALE nuclease pair POT33_T03 within a POT33 allele
caagtgtgtgcaatagtagttctactactacaactctcaaaactcctttcatttcatccaatacttctttaggttccactccataagccctctcaacttttcctccatggaaaacgtaacaaaactttcaaagtctcatgcaaagtttctaatagtggtgaccaaaaccaaaacattgaaacgaattctgttgatcgaagaaatgttcttcttggcttaggaggtctttatggtgttgctaatgctataccattagcagcatcggctactcctataccatcccctgatctcaaaacttgtggtagagccaccatatcggatggtccactagtaccctatacttgttgcccccctcctcatgccaactaactttagtacaccacttccatatcacaagttcccatccatcttgctttgattgaggaggtatattgtcccaaagtacaaattttggcaattagtcgaatgaaagatcttgataagacagaccctttaaaccctcttgg

SEQ ID NO: 1983 - DNA, 512 bp, Artificial
  Mutation introduced by TALE nuclease pair POT33_T03 within a POT33 allele
caagtgtgtgcaatagtagttctactactacaactctcaaaactcctttcatttcatccaatacttctttaggttccactcctaagcccctctcaacttttcctccatggaaaacgtaacaaaactttcaaagtctcttgcaaagtttctaatagtggtgaccaaaaccaaaacattgaaacgaattctgttgatcgaagaaatgttcttcttggcttaggaggtctttatggtgttgctaatgctataccattagcagcatcggctactcctataccatcccctgatctctcgtcttgtagtatagccaggattaacgaaaatcaggtggtgccgtacagttgttgcgcgcctaagcctgatgatatggagaaagttccgtattacaagttcccttctatgactaagctccgtgttcgtctcatgctgttgatgaggagtatattgctaagtataatttggccataagtcgaatgaaagatcttgataagacagaccctttaaaccctctt

SEQ ID NO: 1984 - DNA, 501 bp, Artificial
  Mutation introduced by TALE nuclease pair POT33_T03 within a POT33 allele
cagtgtgtgcaatagtagttctactactacaactctcaaaactcctttcatttcatccaatacttctttaggttccactcctaagcccctctcaacttttcctccatggaaaacgtaacaaaactttcaaagtctcttgcaaagtttctaatagtggtgaccaaaaccaaaacattgaaacgaattctgttgatcgaagaaatgttcttcttggcttaggaggtctttatggtgttgctaatgctataccattagcagcatcggctactcctataccatcccctgatctcaaaacttgtggtagagccaccatatcggatggtccactagtaccctatacttgttgcccccctcctatgccaactaactttgtacaccacttccattattcacaagttcccttcctatgactaaactccagtactccgtccctcatgcctgttgatgaggagtagtattgctaagtataatttggccataagtcgaatgaaagatcttgat

SEQ ID NO: 1985 - DNA, 494 bp, Artificial
  Mutation introduced by TALE nuclease pair POT33_T03 within a POT33 allele
caagtgtgtgcaatagtagttctactactacaactctcaaaactcctttcatttcatccaatacttctttaggttccactcctaagcccctctcaacttttcctccatggaaaacgtaacaaaactttcaaagtctcttgcaaagtttctaatagtggtgaccaaaaccaaaacattgaaacgaattctgttgatcgaagaaatgttcttcttggcttaggaggtctttatggtgttgctaatgctataccattagcagcatcggctactcctataccatcccctgatctcaaaacttgtggtagagccaccatatcggatggtccactagtaccctatacttgttgcccccctcctcatgccaactaactttgtacaccacttccattattcacaagtttcccattccttatgactaaactccagtactccgtccagatcgaggacgtatattgcgtaagtataattttggccataagtcgaattgaaacgat

SEQ ID NO: 1986 - DNA, 516 bp, Artificial
  Mutation introduced by TALE nuclease pair POT33_T03 within a POT33 allele
caagtgtgtgcaatagtagttctactactacaactctcaaaactcctttcatttcatccaatacttctttaggttccactcctaagcccctctcaacttttcctccatggaaaacgtaacaaaactttcaaagtctcttgcaaagtttctaatagtggtgaccaaaaccaaaacattgaaacgaattctgttgatcgaagaaatgttcttcttggcttaggaggtctttatggtgttgctaatgctataccattagcagcatcggctactcctataccatcccctgatctcaaaacttgtggtagagccaccatatcggatggtccactagtaccctatacttgttgcccccctcctatgccaactaactttgacaccattccatattacaagttcccttctatgactaaactccgtatccgtcctcatgctgttgatgaggagtatattgctaagtataatttggccataagtcgaatgaaagatcttgataagacagaccctttaaaccctctt

SEQ ID NO: 1987 - DNA, 515 bp, Artificial
  Mutation introduced by TALE nuclease pair POT33_T03 within a POT33 allele
caagtgtgtgcaatagtagttctactactacaactctcaaaactcctttcatttcatccaatacttctttaggttccactcctaagcccctctcaacttttcctccatggaaaacgtaacaaaactttcaaagtctcttgcaaagtttctaatagtggtgaccaaaaccaaaacattgaaacgaattctgttgatcgaagaaatgttcttcttggcttaggaggtctttatggtgttgctaatgctataccattagcagcatcggctactcctataccatcccctgatctcaaaacttgtggtagagccaccatatcggatggtccactagtaccctatacttgttgcccccctcctatgccaactaactttgacaccattccattattacaagttcccttcctatgactaaactccgtatccgtccgctgttgatgtaggagtatattgctaagtataatttggccataagtcgaatgaaagatcttgataagacagaccctttaaaccctctt

SEQ ID NO: 1988 - DNA, 497 bp, Artificial
  Mutation introduced by TALE nuclease pair POT33_T03 within a POT33 allele
caagtgtgtgcaatagtagttctactactacaactctcaaaactcctttcatttcatccaatacttctttaggttccactcctaagcccctctcaacttttcctccatggaaaacgtaacaaaactttcaaagtctcttgcaaagtttctaatagtggtgaccaaaaccaaaacattgaaacgaattctgttgatcgaagaaatgttcttcttggcttaggaggtctttatggtgttgctaatgctataccattagcagcatcggctactcctataccatcccctgatctcaaaacttgtggtagagccaccatatcggatggtccactagtaccctatacttgttgcccccctcctatgccaactaactttgacaccattccatattacaagttcccttctatgactaaactccgtatgaggagtatattgctaagtataatttggccataagtcgaatgaaagatcttgataagacagaccctttaaaccctctt

SEQ ID NO: 1989 - DNA, 523 bp, Artificial
  Mutation introduced by TALE nuclease pair POT33_T03 within a POT33 allele
caagtgtgtgcaatagtagttctactactacaactctcaaaactcctttcatttcatccaatacttctttaggttccactcctaagccctctcaacttttcctccatggaaaacgtaacaaaactttcaaagtctcttgcaaagtttctaatagtggtgaccaaaaccaaaacattgaaacgaattctgttgatcgaagaaatgttcttcttggcttaggaggtctttatggtgttgctaatgctataccattagcagcatcggctactcctataccatcccctgatctcaaaacttgtggtagagccaccatatcggatggtccactagtaccctatacttgttgcccccctcctcatgccaactaactttagtacaccacttccattatcacaagtttacccattttcattgactaaactccgtatccgctcatgctgttgatgaggagtatattgctaagtataatttggccataagtcgaatgaaagatcttgataagacagaccctttaaaccctctt

SEQ ID NO: 1990 - DNA, 421 bp, Artificial
  Mutation introduced by TALE nuclease pair POT33_T03 within a POT33 allele
caagtgtgtgcaatagtagttctactactacaactctcaaaactcctttcatttcatccaatacttctttaggttccactcctaagccctctcaacttttcctccatggaaaacgtaacaaaactttcaaagtctcttgcaaagtttctaatagtggtgaccaaaaccaaaacattgaaacgaattctgttgatcgaagaaatgttcttcttggcttaggaggtctttatggtgttgctaatgctataccattagcagcatcggctactcctataccatcccctgatctcaaaacttgtggtagagccaccatatcggatggtccactagtaccctatacttgttagtatattgctaagtataatttggccataagtcgaatgaaagatcttgataagacagaccctttaaaccctcttgg

SEQ ID NO: 1991 - DNA, 522 bp, Artificial
  Mutation introduced by TALE nuclease pair POT33_T03 within a POT33 allele
caagtgtgtgcaatagtagttctactactacaactctcaaaactcctttcatttcatccaatacttctttaggttccactcctaagcccctctcaacttttcctccatggaaaacgtaacaaaactttcaaagtctcttgcaaagtttctaatagtggtgaccaaaaccaaaacattgaaacgaattctgttgatcgaagaaatgttcttcttggcttaggaggtctttatggtgttgctaatgctataccattagcagcatcggctactcctataccatcccctgatctcaaaacttgtggtagagccaccatattcggatggtccactagtaccctatacttgttgcccccctcctatgccaactaactttgtacaccattccatattcacaagttcccttctatgactaaactccagtatccgtccctgatgctgcttgatgaggagtatattgctaagtataatttggccataagtcgaatgaaagatcttgataagacagaccctttaaaccctctt

SEQ ID NO: 1992 - DNA, 429 bp, Artificial
  Mutation introduced by TALE nuclease pair POT33_T03 within a POT33 allele
caagtgtgtgcaatagtagttctactactacaactctcaaaactcctttcatttcatccaatacttctttaggttccactcctaagcccctctcaacttttcctccatggaaaacgtaacaaaactttcaaagtctcttgcaaagtttctaatagtggtgaccaaaaccaaaacattgaaacgaattctgttgatcgaagaaatgttcttcttggcttaggaggtctttatggtgttgctaatgctataccattagcagcatcggctactcctataccatcccctgatctcaaaacttgtggtagagccaccatatcggatggtccactagtaccctatacttgttgatgaggagtatattgctaagtataatttgggccataagtcgaatgaaagatcttgataagacagaccctttaaaccctctgg

SEQ ID NO: 1993 - DNA, 459 bp, Artificial
  Mutation introduced by TALE nuclease pair POT33_T03 within a POT33 allele
caagtgtgtgcaatagtagttctactactacaactctcaaaactcctttcatttcatccaatacttctttaggttccactcctaagccctctcaacttttcctccatggaaaacgtaacaaaactttcaaagtctcatgcaaagtttctaatagtggtgaccaaaaccaaaacattgaaacgaattctgttgatcgaagaaatgttcttcttggcttaggaggtctttatggtgttgctaatgctataccattagcagcatcggctactcctataccatcccctgatctcaaaacttgtggtagagccaccatatcggatggtccactagtaccctatacttgttgcccccctcctatgccaactaactttgacaccattccatattacaagatgaggagtatattgccaagtacaatttggcaattagtcgaatgaaagatcttgataagacagaccc

SEQ ID NO: 1994 - DNA, 489 bp, Artificial
  Mutation introduced by TALE nuclease pair POT33_T03 within a POT33 allele
caagtgtgtgcaatagtagttctactactacaactctcaaaactcctttcatttcatccaatacttctttaggttccactcctaagcccctctcaacttttcctccatggaaaacgtaacaaaactttcaaagtctcttgcaaagtttctaatagtggtgaccaaaaccaaaacattgaaacgaattctgttgatcgaagaaatgttcttcttggcttaggaggtctttatggtgttgctaatgctataccattagcagcatcggctactcctataccatcccctgatctcaaaacttgtggtagagccaccatatcggatggtccactagtaccctatacttgttgcccccctcctcatgccaactaactttgtacaccacttccattattcacaagttgctcatcttgttgatgaggagtatattgtcccaagtacaattttggcaattagtcgaatgaaagatcttgataagacagaccctttaaa

SEQ ID NO: 1995 - DNA, 453 bp, Artificial
  Mutation introduced by TALE nuclease pair POT33_T03 within a POT33 allele
caagtgtgtgcaatagtagttctactactacaactctcaaaactcctttcatttcatccaatacttctttaggttccactcctaagcccctctcaacttttcctccatggaaaacgtaacaaaactttcaaagtctcttgcaaagtttctaatagtggtgaccaaaaccaaaacattgaaacgaattctgttgatcgaagaaatgttcttcttggcttaggaggtctttatggtgttgctaatgctataccattagcagcatcggctactcctataccatcccctgatctcaaaacttgtggtagagccaccatatcggatggtccactagtaccctatacttgttgcccccctcctatgccaactaactttgacaccattccatattacaagttcccttctatgactaaactccgtattgttgatgaggagtatatttgctaagtataattt

SEQ ID NO: 1996 - DNA, 511 bp, Artificial
  Mutation introduced by TALE nuclease pair POT33_T03 within a POT33 allele
caagtgtgtgcaatagtagttctactactacaactctcaaaactcctttcatttcatccaatacttctttaggttccactcctaagcccctctcaacttttcctccatggaaaacgtaacaaaactttcaaagtctcatgcaaagtttctaatagtggtgaccaaaaccaaaacattgaaacgaattctgttgatcgaagaaatgttcttcttggcttaggaggtctttatggtgttgctaatgctataccattagcagcatcggctactcctataccatcccctgatctcaaaacttgtggtagagccaccatatcggatggtccactagtaccctatacttgttgcccccctcctatgccaactaactttgacaccattccatattacaagttcccttctatgactaaactccgtatccgtccttgttgatgaggagtatattgccaagtacaatttggcaattagtcgaatgaaagatcttgataagacagaccctttaaaccctctt

SEQ ID NO: 1997 - DNA, 590 bp, Artificial
  Mutation introduced by TALE nuclease pair POT33_T03 within a POT33 allele
caagtgtgtgcaatagtaattctactactacaactctcaaaactcctttcatttcatccaatacttctttaggttccactcctaagcccctctcaacttttcctccatggaaaacgtaacaaaactttcaaagtctcttgcaaagtttctaatagtggtgaccaaaaccaaaacattgaaacgaattctgttgatcgaagaaatgttcttcttggcttaggaggtctttatggtgttgctaatgctataccattagcagcatcggctactcctataccatcccctgatctcaaaacttgtggtagagccaccatatcggatggtccactagtaccctatacttgttgcccccctcctatgccaactaactttgacaccattccatattacaagttttacggtcttgaccccctacgcaggtggtggcccatcgccagcaatggcggtggcaagcaggcgctggagacggtccagcggctgttgccggtgctgtgccaggctcatgctgttgatgaggagtatattgctaagtataatttggccatgaagtcgaatgaaagatcttgataagacagaccctttaaaccctc

SEQ ID NO: 1998 - DNA, 504 bp, Artificial
  Mutation introduced by TALE nuclease pair POT33_T03 within a POT33 allele
caagtgtgtgcaatagtagttctactactacaactctcaaaactcctttcatttcatccaatacttctttaggttccactcctaagcccctctcaacttttcctccatggaaaacgtaacaaaactttcaaagtctcttgcaaagtttctaatagtggtgaccaaaaccaaaacattgaaacgaattctgttgatcgaagaaatgttcttcttggcttaggaggtctttatggtgttgctaatgctataccattagcagcatcggctactcctataccatcccctgatctcaaaacttgtggtagagccaccatatcggatggtccactagtaccctatacttgttgcccccctcctatgccaactaactttgacaccattccatattacaagttcccttctatgactaaactccgtatccgtccctcatgctgttgatgaggagtatattgctaagtataatttggccataagtcgaatgaaagatcttgataagacagaccc

SEQ ID NO: 1999 - DNA, 509 bp, Artificial
  Mutation introduced by TALE nuclease pair POT33_T03 within a POT33 allele
caagtgtgtgcaatagtagttctactactacaactctcaaaactcctttcatttcatccaatacttctttaggttccactcctaagcccctctcaacttttcctccatggaaaacgtaacaaaactttcaaagtctcttgcaaagtttctaatagtggtgaccaaaaccaaaacattgaaacgaattctgttgatcgaagaaatgttcttcttggcttaggaggtctttatggtgttgctaatgctataccattagcagcatcggctactcctataccatcccctgatctcaaaacttgtggtagagccaccatatcggatggtccactagtaccctatacttgttgcccccctcctatgccaactaactttgacaccattccatattacaagttcccttctatgactaaactccgtatcatgctgttgatgaggagtatattgctaagtataatttggccataagtcgaatgaaagatcttgataagacagaccctttaaaccctctt

SEQ ID NO: 2000 - DNA, 504 bp, Artificial
  Mutation introduced by TALE nuclease pair POT33_T03 within a POT33 allele
caagtgtgtgcaatagtagttctactactacaactctcaaaactcctttcatttcatccaatacttctttaggttccactcctaagcccctctcaacttttcctccatggaaaacgtaacaaaactttcaaagtctcttgcaaagtttctaatagtggtgaccaaaaccaaaacattgaaacgaattctgttgatcgaagaaatgttcttcttggcttaggaggtctttatggtgttgctaatgctataccattagcagcatcggctactcctataccatcccctgatctcaaaacttgtggtagagccaccatatcggatggtccactagtaccctatacttgttgcccccctcctatgccaactaactttgacaccattccatattacaagttcccttctatgactaaactccgtatccgtcgctcatgctgttgatgaggagtatattgctaagtataatttggccataagtcgaatgaaagatcttgataagacagaccc

SEQ ID NO: 2001 - DNA, 485 bp, Artificial
  Mutation introduced by TALE nuclease pair POT33_T03 within a POT33 allele
caagtgtgtgcaatagtagttctactactacaactctcaaaactcctttcatttcatccaatacttctttaggttccactcctaagcccctctcaacttttcctccatggaaaacgtaacaaaactttcaaagtctcttgcaaagtttctaatagtggtgaccaaaaccaaaacattgaaacgaattctgttgatcgaagaaatgttcttcttggcttaggaggtctttatggtgttgctaatgctataccattagcagcatcggctactcctataccatcccctgatctcaaaacttgtggtagagccaccatatcggatggtccactagtaccctatacttgttgcccccctcctatgccaactaactttgacaccattccatattacaagctcatcttgttgatgaggagtatattgccaagtacaatttggcaattagtcgaatgaaagatcttgataagacagaccctttaaaccctctt

SEQ ID NO: 2002 - DNA, 480 bp, Artificial
  Mutation introduced by TALE nuclease pair POT33_T03 within a POT33 allele
caagtgtgtgcaatagtagttctactactacaactctcaaaactcctttcatttcatccaatacttctttaggttccactcctaagccctctcaacttttcctccatggaaaacgtaacaaaactttcaaagtctcttgcaaagtttctaatagtggtgaccaaaaccaaaacattgaaacgaattctgttgatcgaagaaatgttcttcttggcttaggaggtctttatggtgttgctaatgctataccattagcagcatcggctactcctataccatcccctgatctcaaaacttgtggtagagccaccatatcggatggtccactagtaccctatacttgttgcccccctcctatgccaactaactttgacaccattccatattacaagttctgttgatgaggagtatattgctaagtataatttggccataagtcgaatgaaagatcttgataagacagaccctttaaaccctctt

SEQ ID NO: 2003 - DNA, 496 bp, Artificial
  Mutation introduced by TALE nuclease pair POT33_T03 within a POT33 allele
caagtgtgtgcaatagtagttctactactacaactctcaaaactcctttcatttcatccaatacttctttaggttccactcctaagcccctctcaacttttcctccatggaaaacgtaacaaaactttcaaagtctcttgcaaagtttctaatagtggtgaccaaaaccaaaacattgaaacgaattctgttgatcgaagaaatgttcttcttggcttaggaggtctttatggtgttgctaatgctataccattagcagcatcggctactcctataccatcccctgatctcaaaacttgtggtagagccaccatatcggatggtccactagtaccctatacttgttgcccccctcctatgccaactaactttgacaccattccatattacaagttccttctatgactaaactccgtattgctgttgatgaggagtatattgctaagtataatttggccataagtcgaatgaaagatcttgataagacagacccttt

SEQ ID NO: 2004 - DNA, 511 bp, Artificial
  Mutation introduced by TALE nuclease pair POT33_T03 within a POT33 allele
caagtgtgtgcaatagtagttctactactacaactctcaaaactcctttcatttcatccaatacttctttaggttccactcctaagcccctctcaacttttcctccatggaaaacgtaacaaaactttcaaagtctcttgcaaagtttctaatagtggtgaccaaaaccaaaacattgaaacgaattctgttgatcgaagaaatgttcttcttggcttaggaggtctttatggtgttgctaatgctataccattagcagcatcggctactcctataccatcccctgatctcaaaacttgtggtagagccaccatatcggatggtccactagtaccctatacttgttgcccccctcctatgccaactaactttgacaccattccatattacaagttcccttctatgactaaactccgtatctcatgctgttgatgaggagtatattgctaagtataatttggccataagtcgaatgaaagatcttgataagacagaccctttaaaccctctt

SEQ ID NO: 2005 - DNA, 491 bp, Artificial
  Mutation introduced by TALE nuclease pair POT33_T03 within a POT33 allele
caagtgtgtgcaatagtagttctactactacaactctcaaaactcctttcatttcatccaatacttctttaggttccactcctaagccctctcaacttttcctccatggaaaacgtaacaaaactttcaaagtctcatgcaaagtttctaatagtggtgaccaaaaccaaaacattgaaacgaattctgttgatcgaagaaatgttcttcttggcttaggaggtctttatggtgttgctaatgctataccattagcagcatcggctactcctataccatcccctgatctcaaaacttgtggtagagccaccatatcggatggtccactagtaccctatacttgttgcccccctcctatgccaactaactttgacaccattccatattacaagttcccttctatgactaaactccgtatccgtccttgttgatgaggagtatattgccaagtacaatttggcaattagtcgaatgaaagatcttgataagac

SEQ ID NO: 2006 - DNA, 507 bp, Artificial
  Mutation introduced by TALE nuclease pair POT33_T03 within a POT33 allele
caagtgtgtgcaatagtagttctactactacaactctcaaaactcctttcatttcatccaatacttctttaggttccactcctaagcccctctcaacttttcctccatggaaaacgtaacaaaactttcaaagtctcttgcaaagtttctaatagtggtgaccaaaaccaaaacattgaaacgaattctgttgatcgaagaaatgttcttcttggcttaggaggtctttatggtgttgctaatgctataccattagcagcatcggctactcctataccatcccctgatctcaaaacttgtggtagagccaccatatcggatggtccactagtaccctatacttgttgcccccctcctatgccaactaactttgtacaccacttccattattcacaagttcccttcctatgactaaactccagtattgatgaggagtatattgctaagtataatttggccataagtcgaatgaaagatcttgataagacagaccctttaaaccctctt

SEQ ID NO: 2007 - DNA, 485 bp, Artificial
  Mutation introduced by TALE nuclease pair POT33_T03 within a POT33 allele
caagttgtgcaatagtagttctactactacaactctcaaaactcctttcatttcatccaatacttctttaggttccactcctaagccctctcaacttttcctccatggaaaacgtaacaaaactttcaaagtctcttgcaaagtttctaatagtggtgaccaaaaccaaaacattgaaacgaattctgttgatcgaagaaatgttcttcttggcttaggaggtctttatggtgttgctaatgctataccattagcagcatcggctactcctataccatcccctgatctcaaaacttgtggtagagccaccatatcggatggtccactagtaccctatacttgttgcccccctcctatgccaactaactttgacaccattccatattacgttctcatcttgttgatgaggagtatattgccaagtacaatttggcaattagtcgaatgaaagatcttgataagacagaccctttaaaccctcttgg

SEQ ID NO: 2008 - DNA, 489 bp, Artificial
  Mutation introduced by TALE nuclease pair POT33_T03 within a POT33 allele
caagtgtgtgcaatagtagttctactactacaactctcaaaactcctttcatttcatccaatacttctttaggttccactcctaagcccctctcaacttttcctccatggaaaacgtaacaaaactttcaaagtctcttgcaaagtttctaatagtggtgaccaaaaccaaaacattgaaacgaattctgttgatcgaagaaatgttcttcttggcttaggaggtctttatggtgttgctaatgctataccattagcagcatcggctactcctataccatcccctgatctcaaaacttgtggtagagccaccatatcggatggtccactagtaccctatacttgttgcccccctcctatgccaactaactttgacaccattccatattacaagtgctcatcttgttgatgaggagtatattgccaagtacaatttggcaattagtcgaatgaaagatcttgataagacagaccctttaaaccctcttgg

SEQ ID NO: 2009 - DNA, 487 bp, Artificial
  Mutation introduced by TALE nuclease pair POT33_T03 within a POT33 allele
caagtgtgtgcaatagtagttctactactacaactctcaaaactcctttcatttcatccaatacttctttaggttccactcctaagccctctcaacttttcctccatggaaaacgtaacaaaactttcaaagtctcatgcaaagtttctaatagtggtgaccaaaaccaaaacattgaaacgaattctgttgatcgaagaaatgttcttcttggcttaggaggtctttatggtgttgctaatgctataccattagcagcatcggctactcctataccatcccctgatctcaaaacttgtggtagagccaccatatcggatggtccactagtaccctatacttgttgcccccctcctatgccaactaactttgacaccattccatattacaagtctcatcttgttgatgaggagtatattgccaagtacaatttggcaattagtcgaatgaaagatcttgataagacagaccctttaaaccctcttgg

SEQ ID NO: 2010 - DNA, 431 bp, Artificial
  Mutation introduced by TALE nuclease pair POT33_T03 within a POT33 allele
caagtgtgtgcaatagtagttctactactacaactctcaaaactcctttcatttcatccaatacttctttaggttccactcctaagccctctcaacttttcctccatggaaaacgtaacaaaactttcaaagtctcatgcaaagtttctaatagtggtgaccaaaaccaaaacattgaaacgaattctgttgatcgaagaaatgttcttcttggcttaggaggtctttatggtgttgctaatgctataccattagcagcatcggctactcctataccatcccctgatctcaaaacttgtggtagagccaccatatcggatggtccactagtaccctatacttgttgcccccctcctcatgccaactaactttgtacaccacttccatattcacaagttcaatcttgttgatgaggagtatattgccaatgt

SEQ ID NO: 2011 - DNA, 510 bp, Artificial
  Mutation introduced by TALE nuclease pair POT33_T03 within a POT33 allele
caagtgtgtgcaatagtagttctactactacaactctcaaaactcctttcatttcatccaatacttctttaggttccactcctaagcccctctcaacttttcctccatggaaaacgtaacaaaactttcaaagtctcttgcaaagtttctaatagtggtgaccaaaaccaaaacattgaaacgaattctgttgatcgaagaaatgttcttcttggcttaggaggtctttatggtgttgctaatgctataccattagcagcatcggctactcctataccatcccctgatctcaaaacttgtggtagagccaccatatcggatggtccactagtaccctatacttgttgcccccctcctatgccaactaactttgacaccattccatattacaagttcccttctatgactaaactccgtatccgtcctgttgatgaggagtatattgctaagtataatttggccataagtcgaatgaaagatcttgataagacagaccctttaaaccctctt

SEQ ID NO: 2012 - DNA, 512 bp, Artificial
  Mutation introduced by TALE nuclease pair POT33_T03 within a POT33 allele
caagtgtgtgcaatagtagttctactactacaactctcaaaactcctttcatttcatccaatacttctttaggttccactcctaagcccctctcaacttttcctccatggaaaacgtaacaaaactttcaaagtctcttgcaaagtttctaatagtggtgaccaaaaccaaaacattgaaacgaattctgttgatcgaagaaatgttcttcttggcttaggaggtctttatggtgttgctaatgctataccattagcagcatcggctactcctataccatcccctgatctcaaaacttgtggtagagccaccatatcggatggtccactagtaccctatacttgttgcccccctcctatgccaactaactttgacaccattccatattacaagttcccttctatgactaaactccgtatccgtccctgttgatgacggagtatattgctaagtataatttggccataagtcgaatgaaagatcttgataagacagaccctttaaaccctctt

SEQ ID NO: 2013 - DNA, 428 bp, Artificial
  Mutation introduced by TALE nuclease pair POT33_T03 within a POT33 allele
  misc_feature (318): n is a or c or t or g
caagtgtgtgcaatagtagttctactactacaactctcaaaactcctttcatttcatccaatacttctttaggttccactcctaagcccctctcaacttttcctccatggaaaacgtaacaaaactttcaaagtctcttgcaaagtttctaatagtggtgaccaaaaccaaaacattgaaacgaattctgttgatcgaagaaatgttcttcttggcttaggaggtctttatggtgttgctaatgctataccattagcagcatcggctactcctataccatcccctgatctcaaaacttgtggtagagccaccattatnggatggtccctagtaccctatacttgttgatgaggagtatattgctaagtataatttggccataagtcgaatgaaagatcttgataagacagaccctttaaaccctctgg

SEQ ID NO: 2014 - DNA, 495 bp, Artificial
  Mutation introduced by TALE nuclease pair POT33_T03 within a POT33 allele
caagtgtgtgcaatagtagttctactactacaactctcaaaactcctttcatttcatccaatacttctttaggttccactcctaagcccctctcaacttttcctccatggaaaacgtaacaaaactttcaaagtctcttgcaaagtttctaatagtggtgaccaaaaccaaaacattgaaacgaattctgttgatcgaagaaatgttcttcttggcttaggaggtctttatggtgttgctaatgctataccattagcagcatcggctactcctataccatcccctgatctcaaaacttgtggtagagccaccatatcggatggtccactagtaccctatacttgttgcccccctcctatgccaactaactttgacaccattccatattacaagttccctgctcatgctgttgatgaggagtatattgctaagtataattttggccataagtcgaatgaaagatcttgataagacagaccctttaaaccctcttgg

SEQ ID NO: 2015 - DNA, 464 bp, Artificial
  Mutation introduced by TALE nuclease pair POT33_T03 within a POT33 allele
caagtgtgtgcaatagtagttctactactacaactctcaaaactcctttcatttcatccaatacttctttaggttccactcctaagcccctctcaacttttcctccatggaaaacgtaacaaaactttcaaagtctcttgcaaagtttctaatagtggtgaccaaaaccaaaacattgaaacgaattctgttgatcgaagaaatgttcttcttggcttaggaggtctttatggtgttgctaatgctataccattagcagcatcggctactcctataccatcccctgatctcaaaacttgtggtagagccaccatatcggatggtccactagtaccctatacttgttgcccccctcctatgccaactaactttgacaccattccatattacaagttcccttctatgactaaactccgtatccgttccctgctcatgctgttgatgaggagtatattgctaagtat

SEQ ID NO: 2016 - DNA, 480 bp, Artificial
  Mutation introduced by TALE nuclease pair POT33_T03 within a POT33 allele
caagtgtgtgcaatagtagttctactactacaactctcaaaactcctttcatttcatccaatacttctttaggttccactcctaagccctctcaacttttcctccatggaaaacgtaacaaaactttcaaagtctcttgcaaagtttctaatagtggtgaccaaaaccaaaacattgaaacgaattctgttgatcgaagaaatgttcttcttggcttaggaggtctttatggtgttgctaatgctataccattagcagcatcggctactcctataccatcccctgatctcaaaacttgtggtagagccaccatatcggatggtccactagtaccctatacttgttgcccccctcctatgccaactaactttgacaccattccatattacaagttcccagcatgaggagtatattgctaagtataatttggccataagtcgaatgaaagatcttgataagacagaccctttaaaccctctt

SEQ ID NO: 2017 - DNA, 503 bp, Artificial
  Mutation introduced by TALE nuclease pair POT33_T03 within a POT33 allele
caagtgtgtgcaatagtagttctactactacaactctcaaaactcctttcatttcatccaatacttctttaggttccactcctaagcccctctcaacttttcctccatggaaaacgtaacaaaactttcaaagtctcttgcaaagtttctaatagtggtgaccaaaaccaaaacattgaaacgaattctgttgatcgaagaaatgttcttcttggcttaggaggtctttatggtgttgctaatgctataccattagcagcatcggctactcctataccatcccctgatctcaaaacttgtggtagagccaccatatcggatggtccactagtaccctatacttgttgcccccctcctatgccaactaactttgacaccattccatattacaagttcccttctatgactaaactccgtatccgtcctcatgctgttgatgaggagtatattgctaagtataatttggccataagtcgaatgaaagatcttgataagacagaccc

SEQ ID NO: 2018 - DNA, 514 bp, Artificial
  Mutation introduced by TALE nuclease pair POT33_T03 within a POT33 allele
caagtgtgtgcaatagtagttctactactacaactctcaaaactcctttcatttcatccaatacttctttaggttccactcctaagcccctctcaacttttcctccatggaaaacgtaacaaaactttcaaagtctcttgcaaagtttctaatagtggtgaccaaaaccaaaacattgaaacgaattctgttgatcgaagaaatgttcttcttggcttaggaggtctttatggtgttgctaatgctataccattagcagcatcggctactcctataccatcccctgatctcaaaacttgtggtagagccaccatatcggatggtccactagtaccctatacttgttgcccccctcctatgccaactaactttgacaccattccatattacaagttcccttctatgactaaactccgtatccgtccccgctgttgatgaggagtatattgctaagtataatttggccataagtcgaatgaaagatcttgataagacagaccctttaaaccctctt

SEQ ID NO: 2019 - DNA, 487 bp, Artificial
  Mutation introduced by TALE nuclease pair POT33_T03 within a POT33 allele
  misc_feature (429): n is a or c or t or g
caagtgtgtgcaatagtagttctactactacaactctcaaaaccttcctttcatttcatcaatacttctttaggttccactcctaagcccctctcaacttttcctccatggaaaacgtaacaaaactttcaaagtctcttgcaaagtttctaatagtggtgaccaaaaccaaaacattgaaacgaattctgttgatcgaagaaatgttcttcttggcttaggaggtctttatggtgttgctaatgctataccattagcagcatcggctactcctataccatcccctgatctcaaaacttgtggtagagccaccatatcggatggtccactagtaccctatacttgttgcccccctcctatgccaactaactttgacaccattccatattacaagtcatcttgttgatgaggagtatattgccaaagtanaattttggcaattagtcgaatgaaagatcttgataagacagaccctttaaaccctctt

SEQ ID NO: 2020 - DNA, 515 bp, Artificial
  Mutation introduced by TALE nuclease pair POT33_T03 within a POT33 allele
caagtgtgtgcaatagtagttctactactacaactctcaaaactcctttcatttcatccaatacttctttaggttccactcctaagcccctctcaacttttcctccatggaaaacgtaacaaaactttcaaagtctcttgcaaagtttctaatagtggtgaccaaaaccaaaacattgaaacgaattctgttgatcgaagaaatgttcttcttggcttaggaggtctttatggtgttgctaatgctataccattagcagcatcggctactcctataccatcccctgatctcaaaacttgtggtagagccaccatatcggatggtccactagtaccctatacttgttgcccccctcctatgccaactaactttgacaccattccattattacaagttcccttctatgactaaactccgtatccgtccatctgttgatgaggagtatattgctaagtataattttggccataagtcgaatgaaagatcttgataagacagaccctttaaaccctctt

SEQ ID NO: 2021 - DNA, 496 bp, Artificial
  Mutation introduced by TALE nuclease pair POT33_T03 within a POT33 allele
caagtgtgtgcaatagtagttctactactacaactctcaaaactcctttcatttcatccaatacttctttaggttccactcctaagcccctctcaacttttcctccatggaaaacgtaacaaaactttcaaagtctcttgcaaagtttctaatagtggtgaccaaaaccaaaacattgaaacgaattctgttgatcgaagaaatgttcttcttggcttaggaggtctttatggtgttgctaatgctataccattagcagcatcggctactcctataccatcccctgatctcaaaacttgtggtagagccaccatatcggatggtccactagtaccctatacttgttgcccccctcctatgccaactaactttgacaccattccatattacaagttccccctgctcatcttgttgatgaggagtatattgccaagtacaatttggcaattagtcgaatgaaagatcttgataagacagaccctttaaaccctcttgg

SEQ ID NO: 2022 - DNA, 523 bp, Artificial
  Mutation introduced by TALE nuclease pair POT33_T03 within a POT33 allele
caagtgtgtgcaatagtagttctactactacaactctcaaaactcctttcatttcatccaatacttctttaggttccactcctaagcccctctcaacttttcctccatggaaaacgtaacaaaactttcaaagtctcttgcaaagtttctaatagtggtgaccaaaaccaaaacattgaaacgaattctgttgatcgaagaaatgttcttcttggcttaggaggtctttatggtgttgctaatgctataccattagcagcatcggctactcctataccatcccctgatctcaaaacttgtggtagagccaccatatcggatggtccactagtaccctatacttgttgcccccctcctatgccaactaactttgacaccattccatattacaagttcccttctatgactaaactccgtatccgttcctctgctgcttgtatgatggaggtagttattgcttgcaatgatgtataaatttttgggcccataaagttcgaatgaaagatcttgataagacagaccc

SEQ ID NO: 2023 - DNA, 505 bp, Artificial
  Mutation introduced by TALE nuclease pair POT33_T03 within a POT33 allele
caagtgtgtgcaatagtagttctactactacaactctcaaaactcctttcatttcatccaatacttctttaggttccactcctaagcccctctcaacttttcctccatggaaaacgtaacaaaactttcaaagtctcttgcaaagtttctaatagtggtgaccaaaaccaaaacattgaaacgaattctgttgatcgaagaaatgttcttcttggcttaggaggtctttatggtgttgctaatgctataccattagcagcatcggctactcctataccatcccctgatctcaaaacttgtggtagagccaccatatcggatggctccactagtaccctatacttgttgcccccctcctcatgccaactaactttgtacaccacttccattattcacaagtttcccattccttatgacttaaactccagtactccgtcctcatgctgttgatgaggagtatattgcttaagtataattttggccataagtcgaatgaaagatcttg

SEQ ID NO: 2024 - DNA, 505 bp, Artificial
  Mutation introduced by TALE nuclease pair POT33_T03 within a POT33 allele
caagtgtgtgcaatagtagttctactactacaactctcaaaactcctttcatttcatccaatacttctttaggttccactcctaagcccctctcaacttttcctccatggaaaacgtaacaaaactttcaaagtctcttgcaaagtttctaatagtggtgaccaaaaccaaaacattgaaacgaattctgttgatcgaagaaatgttcttcttggcttaggaggtctttatggtgttgctaatgctataccattagcagcatcggctactcctataccatcccctgatctcaaaacttgtggtagagccaccatatcggatggtccactagtaccctatacttgttgcccccctcctatgccaactaactttgacaccattccatattacaagttcccttctatgactaaactccgtatccgtcctgcctgttgatgaggatgtatagttgcttaagatataatttggccataagtcgaatgaaagatcttgataagacagaccc

SEQ ID NO: 2025 - DNA, 429 bp, Artificial
  Mutation introduced by TALE nuclease pair POT33_T03 within a POT33 allele
caagtgtgtgcaatagtagttctactactacaactctcaaaactcctttcatttcatccaatacttctttaggttccactcctaagcccctctcaacttttcctccatggaaaacgtaacaaaactttcaaagtctcttgcaaagtttctaatagtggtgaccaaaaccaaaacattgaaacgaattctgttgatcgaagaaatgttcttcttggcttaggaggtctttatggtgttgctaatgctataccattagcagcatcggctactcctataccatcccctgatctcaaaacttgtggtagagccaccatatcggatggtccactagtaccctatacttgttgcatgaggagtatattgctaagtataatttggccataagtcgaatgaagatcttgataagacagaccctttaaaccctcctgg

SEQ ID NO: 2026 - DNA, 422 bp, Artificial
  Mutation introduced by TALE nuclease pair POT33_T03 within a POT33 allele
caagtgtgtgcaatagtagttctactactacaactctcaaaactcctttcatttcatccaatacttctttaggttccactcctaagcccctctcaacttttcctccatggaaaacgtaacaaaactttcaaagtctcttgcaaagtttctaatagtggtgaccaaaaccaaaacattgaaacgaattctgttgatcgaagaaatgttcttcttggcttaggaggtctttatggtgttgctaatgctataccattagcagcatcggctactcctataccatcccctgatctcaaaacttgtggtagagccaccatatcggatggtccactagtaccctatacttgttagtatattgctaagtataatttggccataagtcgaatgaaagatcttgataagacagaccctttaaaccctcttgg

SEQ ID NO: 2027 - DNA, 591 bp, Artificial
  Mutation introduced by TALE nuclease pair POT33_T03 within a POT33 allele
caagtgtgtgcaatagtaattctactactacaactctcaaaactcctttcatttcatccaatacttctttaggttccactcctaagcccctctcaacttttcctccatggaaaacgtaacaaaactttcaaagtctcttgcaaagtttctaatagtggtgaccaaaaccaaaacattgaaacgaattctgttgatcgaagaaatgttcttcttggcttaggaggtctttatggtgttgctaatgctataccattagcagcatcggctactcctataccatcccctgatctcaaaacttgtggtagagccaccatatcggatggtccactagtaccctatacttgttgcccccctcctatgccaactaactttgacaccattccatattacaagttttacggtcttgaccccctacgcaggtggtggcccatcgccagcaatggcggtggcaagcaggcgctggagacggtccagcgggctgttgccggtgctgtgccaggctcatgctgttgatgaggagtatattgctaagtataatttggccatgaagtcgaatgaaagatcttgataagacagaccctttaaaccctc

SEQ ID NO: 2028 - DNA, 513 bp, Artificial
  Mutation introduced by TALE nuclease pair POT33_T03 within a POT33 allele
caagtgtgtgcaatagtagttctactactacaactctcaaaactcctttcatttcatccaatacttctttaggttccactcctaagcccctctcaacttttcctccatggaaaacgtaacaaaactttcaaagtctcttgcaaagtttctaatagtggtgaccaaaaccaaaacattgaaacgaattctgttgatcgaagaaatgttcttcttggcttaggaggtctttatggtgttgctaatgctataccattagcagcatcggctactcctataccatcccctgatctcaaaacttgtggtagagccaccatatcggatggtccactagtaccctatacttgttgcccccctcctatgccaactaactttgacaccattccatattacaagttcccttctatgactaaactccgtatccgttatgctgttgatgaggagtatattgctaagtataatttggccataagtcgaatgaaagatcttgataagacagaccctttaaaccctctt

SEQ ID NO: 2029 - DNA, 498 bp, Artificial
  Mutation introduced by TALE nuclease pair POT33_T03 within a POT33 allele
caagtgtgtgcaatagtagttctactactacaactctcaaaactcctttcatttcatccaatacttctttaggttccactcctaagcccctctcaacttttcctccatggaaaacgtaacaaaactttcaaagtctcttgcaaagtttctaatagtggtgaccaaaaccaaaacattgaaacgaattctgttgatcgaagaaatgttcttcttggcttaggaggtctttatggtgttgctaatgctataccattagcagcatcggctactcctataccatcccctgatctcaaaacttgtggtagagccaccatatcggatggtccactagtaccctatacttgttgcccccctcctatgccaactaactttgacaccattccatattacaagttcccttctatgactaaactccgtatctcatgctgttgatgaggagtatattgctaagtataatttggccataagtcgaatgaaagatcttgataagacagaccc

SEQ ID NO: 2030 - DNA, 586 bp, Artificial
  Mutation introduced by TALE nuclease pair POT33_T03 within a POT33 allele
caagtgtgtgcaatagtagttctactactacaactctcaaaactcctttcatttcatccaatacttctttaggttccactcctaagcccctctcaacttttcctccatggaaaacgtaacaaaactttcaaagtctcttgcaaagtttctaatagtggtgaccaaaaccaaaacactgaaacgaattctgttgatcgaagaaatgttcttcttggcttaggaggtctttatggtgttgctaatgctataccattagcagcatcggctactcctataccatcccctgatctcaaaacttgtggtagagccaccatatcggatggtccactagtaccctatacttgttgcccccctcctatgccaactaactttgacaccattccatattacaagttcccttctatgactaaactccgtatgtccggccacttcaagggcaactacaaggccagctgaccaggctgaaccacatcaccaactgcaacggcgcgtgctgctcatgctgttgatgaggagtatattgctaagtataatttggccataagtcgaatgaaagatcttgataagacagaccctttaaaccctc

SEQ ID NO: 2031 - DNA, 511 bp, Artificial
  Mutation introduced by TALE nuclease pair POT33_T03 within a POT33 allele
caagtgtgtgcaatagtagttctactactacaactctcaaaactcctttcatttcatccaatacttctttaggttccactcctaagccctctcaacttttcctccatggaaaacgtaacaaaactttcaaagtctcttgcaaagtttctaatagtggtgaccaaaaccaaaacattgaaacgaattctgttgatcgaagaaatgttcttcttggcttaggaggtctttatggtgttgctaatgctataccattagcagcatcggctactcctataccatcccctgatctcaaaacttgtggtagagccaccatatcggatggtccactagtaccctatacttgttgcccccctcctatgccaactaactttgacaccattccatattacaagttcccttctatgactaaactccgtatccgtcccctgttgatgaggagtatattgctaagtataatttggccataagtcgaatgaaagatcttgataagacagaccctttaaaccctctt

SEQ ID NO: 2032 - DNA, 428 bp, Artificial
  Mutation introduced by TALE nuclease pair POT33_T03 within a POT33 allele
caagtgtgtgcaatagtagttctactactacaactctcaaaactcctttcatttcatccaatacttctttaggttccactcctaagcccctctcaacttttcctccatggaaaacgtaacaaaactttcaaagtctcttgcaaagtttctaatagtggtgaccaaaaccaaaacattgaaacgaattctgttgatcgaagaaatgttcttcttggcttaggaggtctttatggtgttgctaatgctataccattagcagcatcggctactcctataccatcccctgatctcaaaacttgtggtagagccaccatatcggatggtccactagtaccctatacttgttgatgaggagtatattgctaagtataatttggccataagtcgaatgaaagatcttgataagacagaccctttaaaccctctgg

SEQ ID NO: 2033 - DNA, 454 bp, Artificial
  Mutation introduced by TALE nuclease pair POT33_T03 within a POT33 allele
caagtgtgtgcaatagtagttctactactacaactctcaaaactcctttcatttcatccaatacttctttaggttccactcctaagcccctctcaacttttcctccatggaaaacgtaacaaaactttcaaagtctcttgcaaagtttctaatagtggtgaccaaaaccaaaacattgaaacgaattctgttgatcgaagaaatgttcttcttggcttaggaggtctttatggtgttgctaatgctataccattagcagcatcggctactcctataccatcccctgatctcaaaacttgtggtagagccaccatatcggatggtccactagtaccctatacttgttgcccccctcctatgccatcccttctatgactaaactccagtatccgtcctcatgctgttgatgaggagtatattgctaagtataattttggccataagtcgaatgaaa

SEQ ID NO: 2034 - DNA, 515 bp, Artificial
  Mutation introduced by TALE nuclease pair POT33_T03 within a POT33 allele
caagtgtgtgcaatagtagttctactactacaactctcaaaactcctttcatttcatccaatacttctttaggttccactcctaagcccctctcaacttttcctccatggaaaacgtaacaaaactttcaaagtctcttgcaaagtttctaatagtggtgaccaaaaccaaaacattgaaacgaattctgttgatcgaagaaatgttcttcttggcttaggaggtctttatggtgttgctaatgctataccattagcagcatcggctactcctataccatcccctgatctcaaaacttgtggtagagccaccatatcggatggtccactagtaccctatacttgttgcccccctcctcatgccaactaactttagtacaccacttccattattcacaagtttcccattccttatgactaaactccagtactctcatgctgttgatgtaggagtagtattgcttaagatataattttggccataagtcgaatgaaagatcttgataagacagaccc

SEQ ID NO: 2035 - DNA, 582 bp, Artificial
  Mutation introduced by TALE nuclease pair POT33_T03 within a POT33 allele
caagtgtgtgcaatagtaattctactactacaactctcaaaactcctttcatttcatccaatacttctttaggttccactcctaagcccctctcaacttttcctccatggaaaacgtaacaaaactttcaaagtctcttgcaaagtttctaatagtggtgaccaaaaccaaaacattgaaacgaattctgttgatcgaagaaatgttcttcttggcttaggaggtctttatggtgttgctaatgctataccattagcagcatcggctactcctataccatcccctgatctcaaaacttgtggtagagccaccatatcggatggtccactagtaccctatacttgttgcccccctcctatgccaactaactttgtacaccattccatattcacaagttttacggtcttgagccccctacgcaggtggtggcctcatcgccagcaatggcggtggcaagcaggcgctggagacggtccagcggctgttgccggtgctgtgccaggctcatgctgttgatgaggagtatattgctaagtataatttggccataagtcgaatgaaagatcttgataagacagaccc

SEQ ID NO: 2036 - DNA, 507 bp, Artificial
  Mutation introduced by TALE nuclease pair POT33_T03 within a POT33 allele
caagtgtgtgcaatagtagttctactactacaactctcaaaactcctttcatttcatccaatacttctttaggttccactcctaagcccctctcaacttttcctccatggaaaacgtaacaaaactttcaaagtctcttgcaaagtttctaatagtggtgaccaaaaccaaaacattgaaacgaattctgttgatcgaagaaatgttcttcttggcttaggaggtctttatggtgttgctaatgctataccattagcagcatcggctactcctataccatcccctgatctcaaaacttgtggtagagccaccatatcggatggtccactagtaccctatacttgttgcccccctcctatgccaactaactttgacaccattccatattacaagttcccttctatgactaaactccgtatccgtgttgatgaggagtatattgctaagtataatttggccataagtcgaatgaaagatcttgataagacagaccctttaaaccctctt

SEQ ID NO: 2037 - DNA, 521 bp, Artificial
  Mutation introduced by TALE nuclease pair POT33_T03 within a POT33 allele
caagtgtgtgcaatagtagttctactactacaactctcaaaactcctttcatttcatccaatacttctttaggttccactcctaagcccctctcaacttttcctccatggaaaacgtaacaaaactttcaaagtctcttgcaaagtttctaatagtggtgaccaaaaccaaaacattgaaacgaattctgttgatcgaagaaatgttcttcttggcttaggaggtctttatggtgttgctaatgctataccattagcagcatcggctactcctataccatcccctgatctcaaaacttgtggtagagccaccatatcggatggtccactagtaccctatacttgttgcccccctcctatgccaactaactttgtacaccattccatattcacaagttcccttcctatgactaaactccagtatccgttgctcatgctgttgatgaggagtatattgctaagtataatttggccataagtcgaatgaaagatcttgataagacagaccctttaaaccctctt

SEQ ID NO: 2038 - DNA, 504 bp, Artificial
  Mutation introduced by TALE nuclease pair POT33_T03 within a POT33 allele
caagtgtgtgcaatagtagttctactactacaactctcaaaactcctttcatttcatccaatacttctttaggttccactcataagcccctctcaacttttcctccatggaaaacgtaacaaaactttcaaagtctcatgcaaagtttctaatagtggtgaccaaaaccaaaacattgaaacgaattctgttgatcgaagaaatgttcttcttggcttaggaggtctttatggtgttgctaatgctataccattagcagcatcggctactcctataccatcccctgatctcaaaacttgtggtagagccaccatatcggatggtccactagtaccctatacttgttgcccccctcctcatgccaactaactttgtacaccacttccatattcacaagttcccatccatcttgcttgattgaggaggtatattgtcccaaagtacaattttggcaattagtcgaatgaaagatcttgataagacagaccctttaaaccctcttgg

SEQ ID NO: 2039 - DNA, 479 bp, Artificial
  Mutation introduced by TALE nuclease pair POT33_T03 within a POT33 allele
caagtgtgtgcaatagtagttctactactacaactctcaaaactcctttcatttcatccaatacttctttaggttccactcctaagcccctctcaacttttcctccatggaaaacgtaacaaaactttcaaagtctcttgcaaagtttctaatagtggtgaccaaaaccaaaacattgaaacgaattctgttgatcgaagaaatgttcttcttggcttaggaggtctttatggtgttgctaatgctataccattagcagcatcggctactcctataccatcccctgatctcaaaacttgtggtagagccaccatatcggatggtccactagtaccctatacttgttgcccccctcctatgccaactaactttgtacaccacttccattattcacaagttcccttcctatgactaaactccagtatccgtcgctcatgctgttgatgaggagtatagttgctaagtataattttggccat

SEQ ID NO: 2040 - DNA, 468 bp, Artificial
  Mutation introduced by TALE nuclease pair POT33_T03 within a POT33 allele
caagtgtgtgcaatagtagttctactactacaactctcaaaactcctttcatttcatccaatacttctttaggttccactcctaagcccctctcaacttttcctccatggaaaacgtaacaaaactttcaaagtctcttgcaaagtttctaatagtggtgaccaaaaccaaaacattgaaacgaattctgttgatcgaagaaatgttcttcttggcttaggaggtctttatggtgttgctaatgctataccattagcagcatcggctactcctataccatcccctgatctcaaaacttgtggtagagccaccatatcggatggtccactagtaccctatacttgttgcccccctcctatgccaactaactttgacaccattccatattacaaccccatgctgttgatgaggagtatattgctaagtataatttggccataagtcgatgaaagatcttgataagacaga

SEQ ID NO: 2041 - DNA, 515 bp, Artificial
  Mutation introduced by TALE nuclease pair POT33_T03 within a POT33 allele
caagtgtgtgcaatagtagttctactactacaactctcaaaactcctttcatttcatccaatacttctttaggttccactcctaagcccctctcaacttttcctccatggaaaacgtaacaaaactttcaaagtctcttgcaaagtttctaatagtggtgaccaaaaccaaaacattgaaacgaattctgttgatcgaagaaatgttcttcttggcttaggaggtctttatggtgttgctaatgctataccattagcagcatcggctactcctataccatcccctgatctcaaaacttgtggtagagccaccatatcggatggtccactagtaccctatacttgttgcccccctcctatgccaactaactttgacaccattccatattacaagttcccttctatgactaaactccagtatccgtccatgctgttgatgaggagtatattgctaagtataatttggccataagtcgaatgaaagatcttgataagacagaccctttaaaccctctt

SEQ ID NO: 2042 - DNA, 520 bp, Artificial
  Mutation introduced by TALE nuclease pair POT33_T03 within a POT33 allele
caagtgtgtgcaatagtaattctactactacaactctcaaaactcctttcatttcatccaatacttctttaggttccactcctaagcccctctcaacttttcctccatggaaaacgtaacaaaactttcaaagtctcttgcaaagtttctaatagtggtgaccaaaaccaaaacattgaaacgaattctgttgatcgaagaaatgttcttcttggcttaggaggtctttatggtgttgctaatgctataccattagcagcatcggctactcctataccatcccctgatctcaaaacttgtggtagagccaccatatcggatggtccactagtaccctatacttgttgcccccctcctcatgccaacctaactttgtacaccacttccattattcacaagttttacaggtcttgagccccctgaccgcaggtggtgggcctgcatcgccagcaaattgggcggttggcaagccaggcgctggagacggtccagcggctgttgccggtgctgtgccaggctc

SEQ ID NO: 2043 - DNA, 519 bp, Artificial
  Mutation introduced by TALE nuclease pair POT33_T03 within a POT33 allele
caagtgtgtgcaatagtagttctactactacaactctcaaaactcctttcatttcatccaatacttctttaggttccactcctaagcccctctcaacttttcctccatggaaaacgtaacaaaactttcaaagtctcttgcaaagtttctaatagtggtgaccaaaaccaaaacattgaaacgaattctgttgatcgaagaaatgttcttcttggcttaggaggtctttatggtgttgctaatgctataccattagcagcatcggctactcctataccatcccctgatctcaaaacttgtggtagagccaccatatcggatggtccactagtaccctatacttgttgcccccctcctatgccaactaactttgacaccattccatattacaagttcccttctatgactaaactccagtatccgtccctcatgcctgttgatgaggagtatattgctaagtataatttggccataagtcgaatgaaagatcttgataagacagaccctttaaaccctctt

SEQ ID NO: 2044 - DNA, 455 bp, Artificial
  Mutation introduced by TALE nuclease pair POT33_T03 within a POT33 allele
caagtgtgtgcaatagtagttctactactacaactctcaaaactcctttcatttcatccaatacttctttaggttcaactcctaagcccctctcaacttttcctccatggaaaacgtaacaaaactttcaaagtctcttgcaaagtttctaatagtggtgaccaaaaccaaaacattgaaacgaattctgttgatcgaagaaatgttcttcttggcttaggaggtctttatggtgttgctaatgctataccattagcagcatcggctactcctataccatcccctgatctcaaaacttgtggtagagccaccatatcggatggtccactagtaccctatacttgttgcccccctcctatgccaactaactttgtacaccattccatattcacaagtttcccttcctatgactaaactccagtactccgtcccatgctgcttgatgtaggagtata

SEQ ID NO: 2045 - DNA, 530 bp, Artificial
  Mutation introduced by TALE nuclease pair POT33_T03 within a POT33 allele
caagtgtgtgcaatagtagttctactactacaactctcaaaactcctttcatttcatccaatacttctttaggttccactcctaagccctctcaacttttcctccatggaaaacgtaacaaaactttcaaagtctcttgcaaagtttctaatagtggtgaccaaaaccaaaacattgaaacgaattctgttgatcgaagaaatgttcttcttggcttaggaggtctttatggtgttgctaatgctataccattagcagcatcggctactcctataccatcccctgatctcaaaacttgtggtagagccaccatatcggatggtccactagtaccctatacttgttgcccccctcctcatgccaactaactttgtacaccacttccattattcacaagtttcccattcctatgactaaactccagtactccgtccgctgcttgatgtaggagtagtatttgcttaagatataaattttggccataagtcgaatgaaagatcttgataagacagacccttttaaaccctctt

SEQ ID NO: 2046 - DNA, 519 bp, Artificial
  Mutation introduced by TALE nuclease pair POT33_T03 within a POT33 allele
  misc_feature (443): n is a or c or t or g
caagtgtgtgcaatagtagttctactactacaactctcaaaactcctttcatttcatccaatacttctttaggttccactcctaagccctctcaacttttcctccatggaaaacgtaacaaaactttcaaagtctcttgcaaagtttctaatagtggtgaccaaaaccaaaacattgaaacgaattctgttgatcgaagaaatgttcttcttggcttaggaggtctttatggtgttgctaatgctataccattagcagcatcggctactcctataccatcccctgatctcaaaacttgtggtagagccaccatatcggatggtccactagtaccctatacttgttgcccccctcctatgccaactaactttgacaccattccatattacaagttcccttctatgactaaactccgtatccgtccctctgctgttgagtgaggnagtattatgctaagtataattttggccataagtcgaatgaaagatcttgataagacagacccttttaaaccctctt

SEQ ID NO: 2047 - DNA, 588 bp, Artificial
  Mutation introduced by TALE nuclease pair POT33_T03 within a POT33 allele
caagtgtgtgcaatagtaattctactactacaactctcaaaactcctttcatttcatccaatacttctttaggttccactcctaagcccctctcaacttttcctccatggaaaacgtaacaaaactttcaaagtctcttgcaaagtttctaatagtggtgaccaaaaccaaaacattgaaacgaattctgttgatcgaagaaatgttcttcttggcttaggaggtctttatggtgttgctaatgctataccattagcagcatcggctactcctataccatcccctgatctcaaaacttgtggtagagccaccatatcggatggtccactagtaccctatacttgttgcccccctcctatgccaactaactttgacaccattccatattacaagttttacggcttgaccccctacgcaggtggtggcccatcgccagcaatggcggtggcaagcaggcgctggagacggtccagcggctgttgccggtgctgtgccaggctcatgctgttgatgaggagtatattgctaagtataatttggccataagtcgaatgaaagatcttgataagacagaccctttaaaccctc

SEQ ID NO: 2048 - DNA, 512 bp, Artificial
  Mutation introduced by TALE nuclease pair POT33_T03 within a POT33 allele
caagtgtgtgcaatagtagttctactactacaactctcaaaactcctttcatttcatccaatacttctttaggttccactcctaagcccctctcaacttttcctccatggaaaacgtaacaaaactttcaaagtctcttgcaaagtttctaatagtggtgaccaaaaccaaaacattgaaacgaattctgttgatcgaagaaatgttcttcttggcttaggaggtctttatggtgttgctaatgctataccattagcagcatcggctactcctataccatcccctgatctcaaaacttgtggtagagccaccatatcggatggtccactagtaccctatacttgttgcccccctcctatgccaactaactttgacaccattccatattacaagttcccttctatgactaaactccgtatccgtccgctgttgatgaggagtatattgctaagtataatttggccataagtcgaatgaaagatcttgataagacagaccctttaaaccctctt

SEQ ID NO: 2049 - DNA, 475 bp, Artificial
  Mutation introduced by TALE nuclease pair POT33_T03 within a POT33 allele
caagtgtgtgcaatagtagttctactactacaactctcaaaactcctttcatttcatccaatacttctttaggttccactcctaagcccctctcaacttttcctccatggaaaacgtaacaaaactttcaaagtctcttgcaaagtttctaatagtggtgaccaaaaccaaaacattgaaacgaattctgttgatcgaagaaatgttcttcttggcttaggaggtctttatggtgttgctaatgctataccattagcagcatcggctactcctataccatcccctgatctcaaaacttgtggtagagccaccatatcggatggtccactagtaccctatacttgttgcccccctcctatgccaactaactttgtacaccattccatattcacaagtttcccttccttatgactaaactccagtatccgtgttgatgaggagtatattgctaagtataatttggccataagtcgaa

SEQ ID NO: 2050 - DNA, 464 bp, Artificial
  Mutation introduced by TALE nuclease pair POT33_T03 within a POT33 allele
caagtgtgtgcaatagtagttctactactacaactctcaaaactcctttcatttcatccaatacttctttaggttccactcctaagcccctctcaacttttcctccatggaaaacgtaacaaaactttcaaagtctcttgcaaagtttctaatagtggtgaccaaaaccaaaacattgaaacgaattctgttgatcgaagaaatgttcttcttggcttaggaggtctttatggtgttgctaatgctataccattagcagcatcggctactcctataccatcccctgatctcaaaacttgtggtagagccaccatatcggatggtccactagtaccctatacttgttgcccccctcctatgccaactaactttgacaccattccagctcatgctgttgatgaggagtatattgctaagtataatttggccataagtcgaatgaaagatcttgataagacagaccc

SEQ ID NO: 2051 - DNA, 515 bp, Artificial
  Mutation introduced by TALE nuclease pair POT33_T03 within a POT33 allele
caagtgtgtgcaatagtagttctactactacaactctcaaaactcctttcatttcatccaatacttctttaggttccactcctaagcccctctcaacttttcctccatggaaaacgtaacaaaactttcaaagtctcttgcaaagtttctaatagtggtgaccaaaaccaaaacattgaaacgaattctgttgatcgaagaaatgttcttcttggcttaggaggtctttatggtgttgctaatgctataccattagcagcatcggctactcctataccatcccctgatctcaaaacttgtggtagagccaccatatcggatggtccactagtaccctatacttgttgcccccctcctatgccaactaactttgacaccattccatattacaagttcccttctatgactaaactccgtatccgtcccatgctgttgatgaggagtatattgctaagtataatttggccataagtcgaatgaaagatcttgataagacagaccctttaaaccctctt

SEQ ID NO: 2052 - DNA, 472 bp, Artificial
  Mutation introduced by TALE nuclease pair POT33_T03 within a POT33 allele
  misc_feature (419): n is a or c or t or g
caagtgtgtgcaatagtagttctactactacaactctcaaaactcctttcatttcatccaatacttctttaggttccactcctaagcccctctcaacttttcctccatggaaaacgtaacaaaactttcaaagtctcttgcaaagtttctaatagtggtgaccaaaaccaaaacattgaaacgaattctgttgatcgaagaaatgttcttcttggcttaggaggtctttatggtgttgctaatgctataccattagcagcatcggctactcctataccatcccctgatctcaaaacttgtggtagagccaccatatcggatggtccactagtaccctatacttgttgcccccctcctcatgccaactaactttagtacaccacttccattattcacaagttagtaatattgctaagttntaatttgccataatgctcgaatgaaagatcttgataagacagacccttttaaa

SEQ ID NO: 2053 - DNA, 489 bp, Artificial
  Mutation introduced by TALE nuclease pair POT33_T03 within a POT33 allele
caagtgtgtgcaatagtagttctactactacaactctcaaaactcctttcatttcatccaatacttctttaggttccactcctaagccctctcaacttttcctccatggaaaacgtaacaaaactttcaaagtctcttgcaaagtttctaatagtggtgaccaaaaccaaaacattgaaacgaattctgttgatcgaagaaatgttcttcttggcttaggaggtctttatggtgttgctaatgctataccattagcagcatcggctactcctataccatcccctgatctcaaaacttgtggtagagccaccatatcggatggtccactagtaccctatacttgttgcccccctcctatgccaactaactttgtacaccacttccatattcacaagtttcccttcctatgactaaactccagtactccgtccagatgaggacgtatattgcgtaagtataatttggccataagtcgaatgaaagatcttg

SEQ ID NO: 2054 - DNA, 519 bp, Artificial
  Mutation introduced by TALE nuclease pair POT33_T03 within a POT33 allele
caagtgtgtgcaatagtagttctactactacaactctcaaaactcctttcatttcatccaatacttctttaggttccactcctaagcccctctcaacttttcctccatggaaaacgtaacaaaactttcaaagtctcttgcaaagtttctaatagtggtgaccaaaaccaaaacattgaaacgaattctgttgatcgaagaaatgttcttcttggcttaggaggtctttatggtgttgctaatgctataccattagcagcatcggctactcctataccatcccctgatctcaaaacttgtggtagagccaccatatcggatggtccactagtaccctatacttgttgcccccctcctatgccaactaactttgacaccattccatattcacaagtttccctttcctatgactaaactccagtatcgctcatgctgttgatgaggagtatattgcttaagtataatttggccataagtcgaatgaaagatcttgataagacagaccctttaaaccctctt

SEQ ID NO: 2055 - DNA, 514 bp, Artificial
  Mutation introduced by TALE nuclease pair POT33_T03 within a POT33 allele
caagtgtgtgcaatagtagttctactactacaactctcaaaactcctttcatttcatccaatacttctttaggttccactcctaagccctctcaacttttcctccatggaaaacgtaacaaaactttcaaagtctcttgcaaagtttctaatagtggtgaccaaaaccaaaacattgaaacgaattctgttgatcgaagaaatgttcttcttggcttaggaggtctttatggtgttgctaatgctataccattagcagcatcggctactcctataccatcccctgatctcaaaacttgtggtagagccaccatatcggatggtccactagtaccctatacttgttgcccccctcctatgccaactaactttgacaccattccatattacaagttcccttctatgactaaactccgtatccgtctcatgctgttgatgaggagtatattgctaagtataatttggccataagtcgaatgaaagatcttgataagacagaccctttaaaccctctt

SEQ ID NO: 2056 - DNA, 515 bp, Artificial
  Mutation introduced by TALE nuclease pair POT33_T03 within a POT33 allele
caagtgtgtgcaatagtagttctactactacaactctcaaaactcctttcatttcatccaatacttctttaggttccactcctaagcccctctcaacttttcctccatggaaaacgtaacaaaactttcaaagtctcttgcaaagtttctaatagtggtgaccaaaaccaaaacattgaaacgaattctgttgatcgaagaaatgttcttcttggcttaggaggtctttatggtgttgctaatgctataccattagcagcatcggctactcctataccatcccctgatctcaaaacttgtggtagagccaccatatcggatggtccactagtaccctatacttgttgcccccctcctatgccaactaactttgacaccattccatattacaagttcccttttattgactaaactccgtatccgctcatgctgttgatgaggagtatattgctaagtataatttggccataagtcgaatgaaagatcttgataagacagaccctttaaaccctctt

SEQ ID NO: 2057 - DNA, 514 bp, Artificial
  Mutation introduced by TALE nuclease pair POT33_T03 within a POT33 allele
caagtgtgtgcaatagtagttctactactacaactctcaaaactcctttcatttcatccaatacttctttaggttccactcctaagcccctctcaacttttcctccatggaaaacgtaacaaaactttcaaagtctcttgcaaagtttctaatagtggtgaccaaaaccaaaacattgaaacgaattctgttgatcgaagaaatgttcttcttggcttaggaggtctttatggtgttgctaatgctataccattagcagcatcggctactcctataccatcccctgatctcaaaacttgtggtagagccaccatatcggatggtccactagtaccctatacttgttgcccccctcctatgccaactaactttgacaccattccatattacaagttcccttttatgactaaactccgtatccgctcatgctgttgatgaggagtatattgctaagtataatttggccataagtcgaatgaaagatcttgataagacagaccctttaaaccctctt

SEQ ID NO: 2058 - DNA, 498 bp, Artificial
  Mutation introduced by TALE nuclease pair POT33_T03 within a POT33 allele
caagtgtgtgcaatagtagttctactactacaactctcaaaactcctttcatttcatccaatacttctttaggttccactcctaagcccctctcaacttttcctccatggaaaacgtaacaaaactttcaaagtctcttgcaaagtttctaatagtggtgaccaaaaccaaaacattgaaacgaattctgttgatcgaagaaatgttcttcttggcttaggaggtctttatggtgttgctaatgctataccattagcagcatcggctactcctataccatcccctgatctcaaaacttgtggtagagccaccatatcggatggtccactagtaccctatacttgttgcccccctcctatgccaactaactttgacaccattccatattacaagttcccttctatgactaaactccgtatccgtgttgatgaggagtatattgctaagtataattttggccataagtcgaatgaaagatcttgataagacagacccttt

SEQ ID NO: 2059 - DNA, 484 bp, Artificial
  Mutation introduced by TALE nuclease pair POT33_T03 within a POT33 allele
caagtgtgtgcaatagtagttctactactacaactctcaaaactcctttcatttcatccaatacttctttaggttccactcctaagcccctctcaacttttcctccatggaaaacgtaacaaaactttcaaagtctcttgcaaagtttctaatagtggtgaccaaaaccaaaacattgaaacgaattctgttgatcgaagaaatgttcttcttggcttaggaggtctttatggtgttgctaatgctataccattagcagcatcggctactcctataccatcccctgatctcaaaacttgtggtagagccaccatatcggatggtccactagtaccctatacttgttgcccccctcctatgccaactaactttgacaccattccatattacaactcatgctgttgatgaggagtatattgctaagtataatttggccataagtcgaatgaaagatcttgataagacagaccctttaaaccctctt

SEQ ID NO: 2060 - DNA, 510 bp, Artificial
  Mutation introduced by TALE nuclease pair POT33_T03 within a POT33 allele
caagtgtgtgcaatagtagttctactactacaactctcaaaactcctttcatttcatccaatacttctttaggttccactcctaagccctctcaacttttcctccatggaaaacgtaacaaaactttcaaagtctcatgcaaagtttctaatagtggtgaccaaaaccaaaacattgaaacgaattctgttgatcgaagaaatgttcttcttggcttaggaggtctttatggtgttgctaatgctataccattagcagcatcggctactcctataccatcccctgatctcaaaacttgtggtagagccaccatatcggatggtccactagtaccctatacttgttgcccccctcctatgccaactaactttgacaccattccatattacaagttcccttctatgactaaactccgtatccgtccttgttgatgaggagtatattgccaagtacaatttggcaattagtcgaatgaaagatcttgataagacagaccctttaaaccctctt

SEQ ID NO: 2061 - DNA, 508 bp, Artificial
  Mutation introduced by TALE nuclease pair POT33_T03 within a POT33 allele
caagtgtgtgcaatagtagttctactactacaactctcaaaactcctttcatttcatccaatacttctttaggttccactcctaagcccctctcaacttttcctccatggaaaacgtaacaaaactttcaaagtctcttgcaaagtttctaatagtggtgaccaaaaccaaaacattgaaacgaattctgttgatcgaagaaatgttcttcttggcttaggaggtctttatggtgttgctaatgctataccattagcagcatcggctactcctataccatcccctgatctcaaaacttgtggtagagccaccatatcggatggtccactagtaccctatacttgttgcccccctcctatgccaactaactttgacaccattccatattacaattcctctgactaaactccgtatccgtcccctgctgcttgatgtaggagtagtattgctcaagatataatttggccataagtcgaatgaaagatcttgataagacagaccctttaaa

SEQ ID NO: 2062 - DNA, 470 bp, Artificial
  Mutation introduced by TALE nuclease pair POT33_T03 within a POT33 allele
caagtgtgtgcaatagtagttctactactacaactctcaaaactcctttcatttcatccaatacttctttaggttccactcctaagcccctctcaacttttcctccatggaaaacgtaacaaaactttcaaagtctcttgcaaagtttctaatagtggtgaccaaaaccaaaacattgaaacgaattctgttgatcgaagaaatgttcttcttggcttaggaggtctttatggtgttgctaatgctataccattagcagcatcggctactcctataccatcccctgatctcaaaacttgtggtagagccaccatatcggatggtccactagtaccctatacttgttgcccccctcctatgccaactaactttgacaccattccatattacaatcatgctgttgatgaggagtatattgctaagtataatttggccataagtcgaatgaaagatcttgataagacagaccc

SEQ ID NO: 2063 - DNA, 505 bp, Artificial
  Mutation introduced by TALE nuclease pair POT33_T03 within a POT33 allele
caagtgtgtgcaatagtagttctactactacaactctcaaaactcctttcatttcatccaatacttctttaggttccactcctaagcccctctcaacttttcctccatggaaaacgtaacaaaactttcaaagtctcttgcaaagtttctaatagtggtgaccaaaaccaaaacattgaaacgaattctgttgatcgaagaaatgttcttcttggcttaggaggtctttatggtgttgctaatgctataccattagcagcatcggctactcctataccatcccctgatctcaaaacttgtggtagagccaccatatcggatggtccactagtaccctatacttgttgcccccctcctatgccaactaactttgacaccattccatattacaagttcccttctatgactaaactccgtatccgtccatctgttgatgaggagtatattgctaagtataattttggccataagtcgaatgaaagatcttgataagacagaccctttt

SEQ ID NO: 2064 - DNA, 513 bp, Artificial
  Mutation introduced by TALE nuclease pair POT33_T03 within a POT33 allele
caagtgtgtgcaatagtagttctactactacaactctcaaaactcctttcatttcatccaatacttctttaggttccactcctaagcccctctcaacttttcctccatggaaaacgtaacaaaactttcaaagtctcttgcaaagtttctaatagtggtgaccaaaaccaaaacattgaaacgaattctgttgatcgaagaaatgttcttcttggcttaggaggtctttatggtgttgctaatgctataccattagcagcatcggctactcctataccatcccctgatctcaaaacttgtggtagagccaccatatcggatggtccactagtaccctatacttgttgcccctctcctatgccaactaactttgacaccattccatattacaagttcccttctatgactaaactccgtatccgtcccgctgttgatgaggagtatattgctaagtataatttggccataagtcgaatgaaagatcttgataagacagaccctttaaaccctctt

SEQ ID NO: 2065 - DNA, 516 bp, Artificial
  Mutation introduced by TALE nuclease pair POT33_T03 within a POT33 allele
caagtgtgtgcaatagtagttctactactacaactctcaaaactcctttcatttcatccaatacttctttaggttccactcctaagccctctcaacttttcctccatggaaaacgtaacaaaactttcaaagtctcttgcaaagtttctaatagtggtgaccaaaaccaaaacattgaaacgaattctgttgatcgaagaaatgttcttcttggcttaggaggtctttatggtgttgctaatgctataccattagcagcatcggctactcctataccatcccctgatctcaaaacttgtggtagagccaccatatcggatggtccactagtaccctatacttgttgcccccctcctatgccaactaactttgacaccattccatattacaagttcccttctatgactaaactccgtatccgtccctcatgctgttgatgaggagtatattgctaagtataatttggccataagtcgaatgaaagatcttgataagacagaccctttaaaccctctt

SEQ ID NO: 2066 - DNA, 514 bp, Artificial
  Mutation introduced by TALE nuclease pair POT33_T03 within a POT33 allele
caagtgtgtgcaatagtagttctactactacaactctcaaaactcctttcatttcatccaatacttctttaggttccactcctaagcccctctcaacttttcctccatggaaaacgtaacaaaactttcaaagtctcttgcaaagtttctaatagtggtgaccaaaaccaaaacattgaaacgaattctgttgatcgaagaaatgttcttcttggcttaggaggtctttatggtgttgctaatgctataccattagcagcatcggctactcctataccatcccctgatctcaaaacttgtggtagagccaccatatcggatggtccactagtaccctatacttgttgcccccctcctatgccaactaactttgtacaccattccatattcacaagttctatgactaaactccgtatccgtccccatgctgttgatgagggagtatattgctaagtataatttggccataagtcgaatgaaagatcttgataagacagaccctttaaaccctctt

SEQ ID NO: 2067 - DNA, 513 bp, Artificial
  Mutation introduced by TALE nuclease pair POT33_T03 within a POT33 allele
caagtgtgtgcaatagtagttctactactacaactctcaaaactcctttcatttcatccaatacttctttaggttccactcctaagcccctctcaacttttcctccatggaaaacgtaacaaaactttcaaagtctcttgcaaagtttctaatagtggtgaccaaaaccaaaacattgaaacgaattctgttgatcgaagaaatgttcttcttggcttaggaggtctttatggtgttgctaatgctataccattagcagcatcggctactcctataccatcccctgatctcaaaacttgtggtagagccaccatatcggatggtccactagtaccctatacttgttgcccccctcctatgccaactaactttgacaccattccatattacaagttcccttctatgactaaactccgtatccgtcatgctgttgatgaggagtatattgctaagtataatttggccataagtcgaatgaaagatcttgataagacagaccctttaaaccctctt

SEQ ID NO: 2068 - DNA, 461 bp, Artificial
  Mutation introduced by TALE nuclease pair POT33_T03 within a POT33 allele
caagtgtgtgcaatagtagttctactactacaactctcaaaactcctttcatttcatccaatacttctttaggttccactcctaagccctctcaacttttcctccatggaaaacgtaacaaaactttcaaagtctcttgcaaagtttctaatagtggtgaccaaaaccaaaacattgaaacgaattctgttgatcgaagaaatgttcttcttggcttaggaggtctttatggtgttgctaatgctataccattagcagcatcggctactcctataccatcccctgatctcaaaacttgtggtagagccaccatatcggatggtccactagtaccctatacttgttgcccccctcctatgccaactaactttgacaccattcctgagggagtatattgctaagtataattttggccataagtcgaatgaaagatcttgataagacagacccttttaaaccct

SEQ ID NO: 2069 - DNA, 528 bp, Artificial
  Mutation introduced by TALE nuclease pair POT33_T03 within a POT33 allele
caagtgtgtgcaatagtagttctactactacaactctcaaaactcctttcatttcatccaatacttctttaggttccactcctaagccctctcaacttttcctccatggaaaacgtaacaaaactttcaaagtctcttgcaaagtttctaatagtggtgaccaaaaccaaaacattgaaacgaattctgttgatcgaagaaatgttcttcttggcttaggaggtctttatggtgttgctaatgctataccattagcagcatcggctactcctataccatcccctgatctcaaaacttgtggtagagccaccatatcggatggtccactagtaccctatacttgttgcccccctcctatgccaactaactttgacaccattccatattacaagttcccttctatgactaaactccgtatccgtccctctgcttgttgagtgaggatagtaattatgccttaaagtataaatttttgggccataagtcgaatgaaagatcttgataagacagacccttttaaaccctctt

SEQ ID NO: 2070 - DNA, 538 bp, Artificial
  Mutation introduced by TALE nuclease pair POT33_T03 within a POT33 allele
caagtgtgtgcaatagtagttctactactacaactctcaaaactcctttcatttcatccaatacttctttaggttccactcctaagcccctctcaacttttcctccatggaaaacgtaacaaaactttcaaagtctcttgcaaagtttctaatagtggtgaccaaaaccaaaacattgaaacgaattctgttgatcgaagaaatgttcttcttggcttaggaggtctttatggtgttgctaatgctataccattagcagcatcggctactcctataccatcccctgatctcaaaacttgtggtagagccaccatatcggatggtccactagtaccctatacttgttgcccccctcctatgccaactaactttgacaccattccatattacaagttcccttctatgactaaactccgtatctccatgctgcttgcatgtaggagtagtagttatgcttgcaatgatgtaattaaatttttgggcccaataaagttcgaaatgaaagatcttgataagacagacccttttaaaccctctt

SEQ ID NO: 2071 - DNA, 494 bp, Artificial
  Mutation introduced by TALE nuclease pair POT33_T03 within a POT33 allele
caagtgtgtgcaatagtagttctactactacaactctcaaaactcctttcatttcatccaatacttctttaggttccactcctaagccctctcaacttttcctccatggaaaacgtaacaaaactttcaaagtctcttgcaaagtttctaatagtggtgaccaaaaccaaaacattgaaacgaattctgttgatcgaagaaatgttcttcttggcttaggaggtctttatggtgttgctaatgctataccattagcagcatcggctactcctataccatcccctgatctcaaaacttgtggtagagccaccatatcggatggtccactagtaccctatacttgttgcccccctcctatgccaactaactttgacaccattccatattacaagttccctgctcatgctgttgatgaggagtatattgctaagtataattttggccataagtcgaatgaaagatcttgataagacagaccctttaaaccctcttgg

SEQ ID NO: 2072 - DNA, 516 bp, Artificial
  Mutation introduced by TALE nuclease pair POT33_T03 within a POT33 allele
caagtgtgtgcaatagtagttctactactacaactctcaaaactcctttcatttcatccaatacttctttaggttcaactcctaagcccctctcaacttttcctccatggaaaacgtaacaaaactttcaaagtctcttgcaaagtttctaatagtggtgaccaaaaccaaaacattgaaacgaattctgttgatcgaagaaatgttcttcttggcttaggaggtctttatggtgttgctaatgctataccattagcagcatcggctactcctataccatcccctgatctcaaaacttgtggtagagccaccatatcggatggtccactagtaccctatacttgttgcccccctcctatgccaactaactttgacaccattccatattacaagttcccttcctatgactaaactccgtatccgtcccatgctgttgatgaggagtatattgctaagtataatttggccataagtcgaatgaaagatcttgataagacagaccctttaaaccctctt

SEQ ID NO: 2073 - DNA, 515 bp, Artificial
  Mutation introduced by TALE nuclease pair POT33_T03 within a POT33 allele
caagtgtgtgcaatagtagttctactactacaactctcaaaactcctttcatttcatccaatacttctttaggttccactcctaagcccctctcaacttttcctccatggaaaacgtaacaaaactttcaaagtctcttgcaaagtttctaatagtggtgaccaaaaccaaaacattgaaacgaattctgttgatcgaagaaatgttcttcttggcttaggaggtctttatggtgttgctaatgctataccattagcagcatcggctactcctataccatcccctgatctcaaaacttgtggtagagccaccatatcggatggtccactagtaccctatacttgttgcccccctcctatgccaactaactttgacaccattccatattacaagttcccttctatgactaaactccgtatccggctcatgctgttgatgaggagtatattgctaagtataatttggccataagtcgaatgaaagatcttgataagacagaccctttaaaccctctt

SEQ ID NO: 2074 - DNA, 511 bp, Artificial
  Mutation introduced by TALE nuclease pair POT33_T03 within a POT33 allele
caagtgtgtgcaatagtagttctactactacaactctcaaaactcctttcatttcatccaatacttctttaggttccactcctaagcccctctcaacttttcctccatggaaaacgtaacaaaactttcaaagtctcttgcaaagtttctaatagtggtgaccaaaaccaaaacattgaaacgaattctgttgatcgaagaaatgttcttcttggcttaggaggtctttatggtgttgctaatgctataccattagcagcatcggctactcctataccatcccctgatctcaaaacttgtggtagagccaccatatcggatggtccactagtaccctatacttgttgcccccctcctcatgcaactaactttgtacaccacttccattattcacaagttctatgactaaactccgtatccgtcatgctgttgatgaggagtatattgctaagtataatttggccataagtcgaatgaaagatcttgataagacagaccctttaaaccctct

SEQ ID NO: 2075 - DNA, 517 bp, Artificial
  Mutation introduced by TALE nuclease pair POT33_T03 within a POT33 allele
caagtgtgtgcaatagtagttctactactacaactctcaaaactcctttcatttcatccaatacttctttaggttccactcctaagcccctctcaacttttcctccatggaaaacgtaacaaaactttcaaagtctcttgcaaagtttctaatagtggtgaccaaaaccaaaacattgaaacgaattctgttgatcgaagaaatgttcttcttggcttaggaggtctttatggtgttgctaatgctataccattagcagcatcggctactcctataccatcccctgatctcaaaacttgtggtagagccaccatatcggatggtccactagtaccctatacttgttgcccccctcctatgccaactaactttgacaccattccatattacaagttcccttctatgactaaactccgtatccgttgctcatgctgttgatgaggagtatattgctaagtataatttggccataagtcgaatgaaagatcttgataagacagaccctttaaaccctctt

SEQ ID NO: 2076 - DNA, 514 bp, Artificial
  Mutation introduced by TALE nuclease pair POT33_T03 within a POT33 allele
caagtgtgtgcaatagtagttctactactacaactctcaaaactcctttcatttcatccaatacttctttaggttccactcctaagcccctctcaacttttcctccatggaaaacgtaacaaaactttcaaagtctcttgcaaagtttctaatagtggtgaccaaaaccaaaacattgaaacgaattctgttgatcgaagaaatgttcttcttggcttaggaggtctttatggtgttgctaatgctataccattagcagcatcggctactcctataccatcccctgatctcaaaacttgtggtagagccaccatatcggatggtccactagtaccctatacttgttgcccccctcctatgccaactaactttgacaccattccatattacaagttcccttctatgactaaactccgtatccgtcgctcatgctgttgatgaggagtatattgctaagtataatttggccataagtcgaatgaaagatcttgataagacagaccctttaaaccct

SEQ ID NO: 2077 - DNA, 481 bp, Artificial
  Mutation introduced by TALE nuclease pair POT33_T03 within a POT33 allele
caagtgtgtgcaatagtagttctactactacaactctcaaaactcctttcatttcatccaatacttctttaggttccactcctaagccctctcaacttttcctccatggaaaacgtaacaaaactttcaaagtctcttgcaaagtttctaatagtggtgaccaaaaccaaaacattgaaacgaattctgttgatcgaagaaatgttcttcttggcttaggaggtctttatggtgttgctaatgctataccattagcagcatcggctactcctataccatcccctgatctcaaaacttgtggtagagccaccatatcggatggtccactagtaccctatacttgttgcccccctcctatgccaactaactttgacaccattccatattacaagatgctgttgatgaggagtatattgctaagtataatttggccataagtcgaatgaaagatcttgataagacagaccctttaaaccctctt

SEQ ID NO: 2078 - DNA, 484 bp, Artificial
  Mutation introduced by TALE nuclease pair POT33_T03 within a POT33 allele
caagtgtgtgcaatagtagttctactactacaactctcaaaactcctttcatttcatccaatacttctttaggttccactcctaagcccctctcaacttttcctccatggaaaacgtaacaaaactttcaaagtctcttgcaaagtttctaatagtggtgaccaaaaccaaaacattgaaacgaattctgttgatcgaagaaatgttcttcttggcttaggaggtctttatggtgttgctaatgctataccattagcagcatcggctactcctataccatcccctgatctcaaaacttgtggtagagccaccatatcggatggtccactagtaccctatacttgttgcccccctcctatgccaactaactttgacaccattccatattacaagtcatgctgttgatgaggagtatattgctaagtataatttggccataagtcgaatgaaagatcttgataagacagaccctttaaaccctctt

SEQ ID NO: 2079 - DNA, 502 bp, Artificial
  Mutation introduced by TALE nuclease pair POT33_T03 within a POT33 allele
caagtgtgtgcaatagtagttctactactacaactctcaaaactcctttcatttcatccaatacttctttaggttccactcctaagcccctctcaacttttcctccatggaaaacgtaacaaaactttcaaagtctcttgcaaagtttctaatagtggtgaccaaaaccaaaacattgaaacgaattctgttgatcgaagaaatgttcttcttggcttaggaggtctttatggtgttgctaatgctataccattagcagcatcggctactcctataccatcccctgatctcaaaacttgtggtagagccaccatatcggatggtccactagtaccctatacttgttgcccccctcctatgccaactaactttgacaccattccatattacaagttcccttctatgactaaactccgtatccgtccatgctgcttgatgaggagtatattgctaagtataatttggccataagtcgaatgaaagatcttgataagacagaccc

SEQ ID NO: 2080 - DNA, 521 bp, Artificial
  Mutation introduced by TALE nuclease pair POT33_T03 within a POT33 allele
caagtgtgtgcaatagtagttctactactacaactctcaaaactcctttcatttcatccaatacttctttaggttcaactcctaagcccctctcaacttttcctccatggaaaacgtaacaaaactttcaaagtctcttgcaaagtttctaatagtggtgaccaaaaccaaaacattgaaacgaattctgttgatcgaagaaatgttcttcttggcttaggaggtctttatggtgttgctaatgctataccattagcagcatcggctactcctataccatcccctgatctcaaaacttgtggtagagccaccatatcggatggtccactagtaccctatacttgttgcccccctcctatgccaactaactttgtacaccacttccatattcacaagttcccttcctatgactaaactccagtatccgtcccatgctgcttgatgaggagtatattgctaagtataatttggccataagtcgaatgaaagatcttgataagacagaccctttaaaccctctt

SEQ ID NO: 2081 - DNA, 517 bp, Artificial
  Mutation introduced by TALE nuclease pair POT33_T03 within a POT33 allele
caagtgtgtgcaatagtagttctactactacaactctcaaaactcctttcatttcatccaatacttctttaggttccactcctaagcccctctcaacttttcctccatggaaaacgtaacaaaactttcaaagtctcttgcaaagtttctaatagtggtgaccaaaaccaaaacattgaaacgaattctgttgatcgaagaaatgttcttcttggcttaggaggtctttatggtgttgctaatgctataccattagcagcatcggctactcctataccatcccctgatctcaaaacttgtggtagagccaccatatcggatggctccactagtaccctatacttgttgcccccctcctatgccaactaactttgacaccattccatattacaagttcccttctatgactaaactccgtatccgtcctcatgctgttgatgaggagtatattgctaagtataatttggccataagtcgaatgaaagatcttgataagacagaccctttaaaccctctt

SEQ ID NO: 2082 - DNA, 479 bp, Artificial
  Mutation introduced by TALE nuclease pair POT33_T03 within a POT33 allele
caagtgtgtgcaatagtagttctactactacaactctcaaaactcctttcatttcatccaatacttctttaggttccactcctaagcccctctcaacttttcctccatggaaaacgtaacaaaactttcaaagtctcttgcaaagtttctaatagtggtgaccaaaaccaaaacattgaaacgaattctgttgatcgaagaaatgttcttcttggcttaggaggtctttatggtgttgctaatgctataccattagcagcatcggctactcctataccatcccctgatctcaaaacttgtggtagagccaccatatcggatggtccactagtaccctatacttgttgcccccctcctagtgccaactaactttgacaccattccatattacaagcttcccttctatgactaaaactccgtatctcatgctgttgatgaggagtatattgctaaagtataatttggccataagtcgaatg

SEQ ID NO: 2083 - DNA, 531 bp, Artificial
  Mutation introduced by TALE nuclease pair POT33_T03 within a POT33 allele
caagtgtgtgcaatagtagttctactactacaactctcaaaactcctttcatttcatccaatacttctttaggttccactcctaagccctctcaacttttcctccatggaaaacgtaacaaaactttcaaagtctcttgcaaagtttctaatagtggtgaccaaaaccaaaacattgaaacgaattctgttgatcgaagaaatgttcttcttggcttaggaggtctttatggtgttgctaatgctataccattagcagcatcggctactcctataccatcccctgatctcaaaacttgtggtagagccaccatatcggatggtccactagtaccctatacttgttgcccccctcctatgccaactaactttgacaccattccatattacaagttcccttctatgactaaactccgtatccgtctgacgagcatcacaaaatcgacgctcaagtccctcatgctgttgatgaggagtatattgctaagtataatttggccataagtcgaatgaaagatcttgataagacaga

SEQ ID NO: 2084 - DNA, 512 bp, Artificial
  Mutation introduced by TALE nuclease pair POT33_T03 within a POT33 allele
caagtgtgtgcaatagtagttctactactacaactctcaaaactcctttcatttcatccaatacttctttaggttccactcctaagccctctcaacttttcctccatggaaaacgtaacaaaactttcaaagtctcttgcaaagtttctaatagtggtgaccaaaaccaaaacattgaaacgaattctgttgatcgaagaaatgttcttcttggcttaggaggtctttatggtgttgctaatgctataccattagcagcatcggctactcctataccatccactgatctcaaaacttgtggtagagccaccatatcggatggtccactagtaccctatacttgttgcccccctcctatgccaactaactttgacaccattccatattacaagttcccttctatgactaaactccgtatccgtcatgctgttgatgaggagtatattgctaagtataatttggccataagtcgaatgaaagatattgataagacagaccctttaaaccctctt

SEQ ID NO: 2085 - DNA, 493 bp, Artificial
  Mutation introduced by TALE nuclease pair POT33_T03 within a POT33 allele
caagtgtgtgcaatagtagttctactactacaactctcaaaactcctttcatttcatccaatacttctttaggttccactcctaagcccctctcaacttttcctccatggaaaacgtaacaaaactttcaaagtctcttgcaaagtttctaatagtggtgaccaaaaccaaaacattgaaacgaattctgttgatcgaagaaatgttcttcttggcttaggaggtctttatggtgttgctaatgctataccattagcagcatcggctactcctataccatcccctgatctcaaaacttgtggtagagccaccatatcggatggtccactagtaccctatacttgttgcccccctcctatgccaactaactttgacaccattccatattacaagttcccgctcatcttgttgatgaggagtatattgccaagtacaatttggcaattagtcgaatgaaagatcttgataagacagaccctttaaaccctcttgg

SEQ ID NO: 2086 - DNA, 502 bp, Artificial
  Mutation introduced by TALE nuclease pair POT33_T03 within a POT33 allele
caagtgtgtgcaatagtagttctactactacaactctcaaaactcctttcatttcatccaatacttctttaggttccactcctaagcccctctcaacttttcctccatggaaaacgtaacaaaactttcaaagtctcttgcaaagtttctaatagtggtgaccaaaaccaaaacattgaaacgaattctgttgatcgaagaaatgttcttcttggcttaggaggtctttatggtgttgctaatgctataccattagcagcatcggctactcctataccatcccctgatctcaaaacttgtggtagagccaccatatcgtatggtccactagtaccctatacttgttgcccccctcctatgccaactaactttgacaccattccatattacaagttcccttctatgactaaactccgtatccgtctcatgctgttgatgaggagtatattgctaagtataatttggccataagtcgaatgaaagatcttgataagacagaccc

SEQ ID NO: 2087 - DNA, 518 bp, Artificial
  Mutation introduced by TALE nuclease pair POT33_T03 within a POT33 allele
caagtgtgtgcaatagtagttctactactacaactctcaaaactcctttcatttcatccaatacttctttaggttccactcctaagcccctctcaacttttcctccatggaaaacgtaacaaaactttcaaagtctcttgcaaagtttctaatagtggtgaccaaaaccaaaacattgaaacgaattctgttgatcgaagaaatgttcttcttggcttaggaggtctttatggtgttgctaatgctataccattagcagcatcggctactcctataccatcccctgatctcaaaacttgtggtagagccaccatatcggatggtccactagtaccctatacttgttgcccccctcctatgccaactaactttgacaccattccatattacaagttcccttctatgactaaactccgtatccgtcgctcatgctgttgatgaggagtatattgctaagtataatttggccataagtcgaatgaaagatcttgataagacagacccttttaaaccctctt

SEQ ID NO: 2088 - DNA, 517 bp, Artificial
  Mutation introduced by TALE nuclease pair POT33_T03 within a POT33 allele
caagtgtgtgcaatagtagttctactactacaactctcaaaactcctttcatttcatccaatacttctttaggttccactcctaagcccctctcaacttttcctccatggaaaacgtaacaaaactttcaaagtctcttgcaaagtttctaatagtggtgaccaaaaccaaaacattgaaacgaattctgttgatcgaagaaatgttcttcttggcttaggaggtctttatggtgttgctaatgctataccattagcagcatcggctactcctataccatcccctgatctcaaaacttgtggtagagccaccatatcggatggtccactagtaccctatacttgttgcccccctcctatgccaactaactttgacaccattccatattacaagttcccttctatgactaaactccgtatccgtcctcatgctgttgatgaggagtatattgctaagtataactttggccataagtcgaatgaaagatcttgataagacagaccctttaaaccctctt

SEQ ID NO: 2089 - DNA, 482 bp, Artificial
  Mutation introduced by TALE nuclease pair POT33_T03 within a POT33 allele
caagtgtgtgcaatagtagttctactactacaactctcaaaactcctttcatttcatccaatacttctttaggttccactcctaagcccctctcaacttttcctccatggaaaacgtaacaaaactttcaaagtctcttgcaaagtttctaatagtggtgaccaaaaccaaaacattgaaacgaattctgttgatcgaagaaatgttcttcttggcttaggaggtctttatggtgttgctaatgctataccattagcagcatcggctactcctataccatcccctgatctcaaaacttgtggtagagccaccatatcggatggtccactagtaccctatacttgttgcccccctcctatgccaactaactttgtacaccacttccatattcacaagtttcccttcctatgactaaactccagtatccgtcccgctccatgctgttgatgaggagtatagttgctaagtataattttggccat

SEQ ID NO: 2090 - DNA, 520 bp, Artificial
  Mutation introduced by TALE nuclease pair POT33_T03 within a POT33 allele
caagtgtgtgcaatagtagttctactactacaactctcaaaactcctttcatttcatccaatacttctttaggttccactcctaagccctctcaacttttcctccatggaaaacgtaacaaaactttcaaagtctcttgcaaagtttctaatagtggtgaccaaaaccaaaacattgaaacgaattctgttgatcgaagaaatgttcttcttggcttaggaggtctttatggtgttgctaatgctataccattagcagcatcggctactcctataccatcccctgatctcaaaacttgtggtagagccaccatatcggatggttccactagtaccctatacttgttgcccccctcctatgccaactaactttgtacaccattccattattacaaagtttcccttccttatgactaaactccgtatccgtccatctgcttgatgaggagtatattgctaagtataatttggccataagtcgaatgaaagatcttgataagacagaccctttaaaccctctt

SEQ ID NO: 2091 - DNA, 473 bp, Artificial
  Mutation introduced by TALE nuclease pair POT33_T03 within a POT33 allele
caagtgtgtgcaatagtagttctactactacaactctcaaaactcctttcatttcatccaatacttctttaggttccactcctaagcccctctcaacttttcctccatggaaaacgtaacaaaactttcaaagtctcttgcaaagtttctaatagtggtgaccaaaaccaaaacattgaaacgaattctgttgatcgaagaaatgttcttcttggcttaggaggtctttatggtgttgctaatgctataccattagcagcatcggctactcctataccatcccctgatctcaaaacttgtggtagagccaccatatcggatggtccactagtaccctatacttgttgcccccctcctatgccaactaactttgtacaccattccatattcacaagttcccttctatgactaaactccagtatccgtccagatgaggacgtatattgctaagtataatttggccataagtcgaa

SEQ ID NO: 2092 - DNA, 511 bp, Artificial
  Mutation introduced by TALE nuclease pair POT33_T03 within a POT33 allele
caagtgtgtgcaatagtagttctactactacaactctcaaaactcctttcatttcatccaatacttctttaggttccactcctaagccctctcaacttttcctccatggaaaacgtaacaaaactttcaaagtctcttgcaaagtttctaatagtggtgaccaaaaccaaaacattgaaacgaattctgttgatcgaagaaatgttcttcttggcttaggaggtctttatggtgttgctaatgctataccattagcagcatcggctactcctataccatcccctgatctcaaaacttgtggtagagccaccatatcggatggtccactagtaccctatacttgttgcccccctcctatgccaactaactttgacaccattccatattacaagttcccttctatgactaaactccgtatccgtccgctgttgatgaggagtatattgctaagtataatttggccataagtcgaatgaaagatcttgataagacagaccctttaaaccctctt

SEQ ID NO: 2093 - DNA, 516 bp, Artificial
  Mutation introduced by TALE nuclease pair POT33_T03 within a POT33 allele
caagtgtgtgcaatagtagttctactactacaactctcaaaactcctttcatttcatccaatacttctttaggttccactcctaagcccctctcaacttttcctccatggaaaacgtaacaaaactttcaaagtctcttgcaaagtttctaatagtggtgaccaaaaccaaaacattgaaacgaattctgttgatcgaagaaatgttcttcttggcttaggaggtctttatggtgttgctaatgctataccattagcagcatcggctactcctataccatcccctgatctcaaaacttgtggtagagccaccatatcggatggtccactagtaccctatacttgttgcccccctcctatgccaactaactttgacaccattccatattacaagttcccttctatgactaaacttcgtatccgtcctcatgctgttgatgaggagtatattgctaagtataatttggccataagtcgaatgaaagatcttgataagacagaccctttaaaccctctt

SEQ ID NO: 2094 - DNA, 529 bp, Artificial
  Mutation introduced by TALE nuclease pair POT33_T03 within a POT33 allele
caagtgtgtgcaatagtagttctactactacaactctcaaaactcctttcatttcatccaatacttctttaggttccactcctaagcccctctcaacttttcctccatggaaaacgtaacaaaactttcaaagtctcttgcaaagtttctaatagtggtgaccaaaaccaaaacattgaaacgaattctgttgatcgaagaaatgttcttcttggcttaggaggtctttatggtgttgctaatgctataccattagcagcatcggctactcctataccatcccctgatctcaaaacttgtggtagagccaccatatcggatggtccactagtaccctatacttgttgcccccctcctcatgccaactaactttgtacaccacttccattattcacaagtttcccatttccttatgactaaactccagtactccgtctcatgctgttgatgaggagtagtattgcttaagtataatttggccataagtcgaatgaaagatcttgataagacagaccctttaaaccctctt

SEQ ID NO: 2095 - DNA, 458 bp, Artificial
  Mutation introduced by TALE nuclease pair POT33_T03 within a POT33 allele
caagtgtgtgcaatagtagttctactactacaactctcaaaactcctttcatttcatccaatacttctttaggttccactcctaagcccctctcaacttttcctccatggaaaacgtaacaaaactttcaaagtctcttgcaaagtttctaatagtggtgaccaaaaccaaaacattgaaacgaattctgttgatcgaagaaatgttcttcttggcttaggaggtctttatggtgttgctaatgctataccattagcagcatcggctactcctataccatcccctgatctcaaaacttgtggtagagccaccatatcggatggtccactagtaccctatacttgttgcccccctcctcatgccaactaactttgtacaccacttccattattcacaagttaactccagctccatgctgttgatgaggagtatattgctaagtataatttggccataag

SEQ ID NO: 2096 - DNA, 510 bp, Artificial
  Mutation introduced by TALE nuclease pair POT33_T03 within a POT33 allele
caagtgtgtgcaatagtagttctactactacaactctcaaaactcctttcatttcatccaatacttctttaggttccactcctaagccctctcaacttttcctccatggaaaacgtaacaaaactttcaaagtctcttgcaaagtttctaatagtggtgaccaaaaccaaaacattgaaacgaattctgttgatcgaagaaatgttcttcttggcttaggaggtctttatggtgttgctaatgctataccattagcagcatcggctactcctataccatcccctgatctcaaaacttgtggtagagccaccatatcggatggtccactagtaccctatacttgttgcccccctcctatgccaactaactttgacaccattccatattacaagttcccttctatgactaaactccgctgctcatgctgttgatgaggagtatattgctaagtataatttggccataagtcgaatgaaagatcttgataagacagaccctttaaaccctctt

SEQ ID NO: 2097 - DNA, 582 bp, Artificial
  Mutation introduced by TALE nuclease pair POT33_T03 within a POT33 allele
caagtgtgtgcaatagtagttctactactacaactctcaaaactcctttcatttcatccaatacttctttaggttccactcctaagcccctctcaacttttcctccatggaaaacgtaacaaaactttcaaagtctcttgcaaagtttctaatagtggtgaccaaaaccaaaacactgaaacgaattctgttgatcgaagaaatgttcttcttggcttaggaggtctttatggtgttgctaatgctataccattagcagcatcggctactcctataccatcccctgatctcaaaacttgtggtagagccaccatatcggatggtccactagtaccctatacttgttgcccccctcctatgccaactaactttgacaccattccatattacaagttcccttctatgactaaactccgtatgtccggccacttcaagggcaactacaaggcccagctgaccaggctgaaccacatcaccaactgcaacggcgccgtgctgctcatgctgttgatgagggagtatattgctaagtataatttggccataagtcgaatgaaagatcttgataagacagaccctttt

SEQ ID NO: 2098 - DNA, 510 bp, Artificial
  Mutation introduced by TALE nuclease pair POT33_T03 within a POT33 allele
caagtgtgtgcaatagtagttctactactacaactctcaaaactcctttcatttcatccaatacttctttaggttccactcctaagcccctctcaacttttcctccatggaaaacgtaacaaaactttcaaagtctcttgcaaagtttctaatagtggtgaccaaaaccaaaacattgaaacgaattctgttgatcgaagaaatgttcttcttggcttaggaggtctttatggtgttgctaatgctataccattagcagcatcggctactcctataccatcccctgatctcaaaacttgtggtagagccaccatatcggatggtccactagtaccctatacttgttgcccccctcctatgccaactaactttgacaccattccatattacaagttcccttctatgactaaactccgtatccgtcatcttgttgatgaggagtatattgccaagtacaatttggcaattagtcgaatgaaagatcttgataagacagaccctttaaaccct

SEQ ID NO: 2099 - DNA, 619 bp, Artificial
  Mutation introduced by TALE nuclease pair POT33_T03 within a POT33 allele
caagtgtgtgcaatagtagttctactactacaactctcaaaactcctttcatttcatccaatacttctttaggttccactcctaagcccctctcaacttttcctccatggaaaacgtaacaaaactttcaaagtctcttgcaaagtttctaatagtggtgaccaaaaccaaaacattgaaacgaattctgttgatcgaagaaatgttcttcttggcttaggaggtctttatggtgttgctaatgctataccattagcagcatcggctactcctataccatcccctgatctcaaaacttgtggtagagccaccatatcggatggtccactagtaccctatacttgttgcccccctcctatgccaactaactttgacaccattccatattacaagttccccagcgcctgcttgccaccaatattgctggcgatggccaccacctgctccggggtcaagccgtggggcctggcacaccaccggcaacagccgctggaccgtctccagcgccttctatgactaaactccgtatcatgctgttgatgaggagtatattgctaagtataatttggccataagtcgaatgaaagatcttgataagacagaccctttaaaccctctt

SEQ ID NO: 2100 - DNA, 509 bp, Artificial
  Mutation introduced by TALE nuclease pair POT33_T03 within a POT33 allele
caagtgtgtgcaatagtagttctactactacaactctcaaaactcctttcatttcatccaatacttctttaggttccactcctaagccctctcaacttttcctccatggaaaacgtaacaaaactttcaaagtctcatgcaaagtttcgaatagtggtgaccaaaaccaaaacgttgaaacgaattctgttgatcgaagaaatgttcttcttggtttaggaggtctatatggtgttgctaatgctataccattagcagcatcggcaactcctataccatcccctgatctcaaaacttgtggtagagccaccatatcggatggtccactagtaccctatacttgttgccccctcctatgccaactaactttgacaccattccatattacaagttcccttctatgactaaactccgtatccgttccctgctcatgctgttgatgaggagtatattgctaagtataatttggccataagtcgaatgaaagatcttgataaaacagaaccgtt

SEQ ID NO: 2101 - DNA, 514 bp, Artificial
  Mutation introduced by TALE nuclease pair POT33_T03 within a POT33 allele
caagtgtgtgcaatagtagttctactactacaactctcaaaactcctttcatttcatccaatacttctttaggttccactcctaagccctctcaacttttcctccatggaaaacgtaacaaaactttcaaagtctcttgcaaagtttctaatagtggtgaccaaaaccaaaacattgaaacgaattctgttgatcgaagaaatgttcttcttggcttaggaggtctttatggtgttgctaatgctataccattagcagcatcggctactcctataccatcccctgatctcaaaacttgtggtagagccaccatatcggatggtccactagtaccctatacttgttgcccccctcctatgccaactaactttgacaccattccatattacaagttccctttttatgactaaactccgtatccgctcatgctgttgatgaggagtatattgctaagtataatttggccataagtcgaatgaaagatcttgataagacagaccctttaaaccctctt

SEQ ID NO: 2102 - DNA, 512 bp, Artificial
  Mutation introduced by TALE nuclease pair POT33_T03 within a POT33 allele
  misc_feature (395): n is a or c or t or g
caagtgtgtgcaatagtagttctactactacaactctcaaaactcctttcatttcatccaatacttctttaggttccactcctaagccctctcaacttttcctccatggaaaacgtaacaaaactttcaaagtctcttgcaaagtttctaatagtggtgaccaaaaccaaaacattgaaacgaattctgttgatcgaagaaatgttcttcttggcttaggaggtctttatggtgttgctaatgctataccattagcagcatcggctactcctataccatcccctgatctcaaaacttgtggtagagccaccatatcggatggtccactagtaccctatacttgttgcccccctcctatgccaactaactttgacaccattccatattacaagttntatgactaaactccgtatccgtccccatgctgttgatgagggagtatattgctaaagtataatttggccataagtcgaatgaaagatcttgataagacagaccctttaaaccctctt

SEQ ID NO: 2103 - DNA, 463 bp, Artificial
  Mutation introduced by TALE nuclease pair POT33_T03 within a POT33 allele
caagtgtgtgcaatagtagttctactactacaactctcaaaactcctttcatttcatccaatacttctttaggttccactcctaagcccctctcaacttttcctccatggaaaacgtaacaaaactttcaaagtctcttgcaaagtttctaatagtggtgaccaaaaccaaaacattgaaacgaattctgttgatcgaagaaatgttcttcttggcttaggaggtctttatggtgttgctaatgctataccattagcagcatcggctactcctataccatcccctgatctcaaaacttgtggtagagccaccatatcggatggtccactagtaccctatacttgttgcccccctcctatgccaactaactttgacaccattccatattacaatcatgctgttgatgaggagtatattgctaagtataattttggccataatgtcgaatgaaagatcttgataa

SEQ ID NO: 2104 - DNA, 514 bp, Artificial
  Mutation introduced by TALE nuclease pair POT33_T03 within a POT33 allele
caagtgtgtgcaatagtagttctactactacaactctcaaaactcctttcatttcatccaatacttctttaggttccactcctaagccctctcaacttttcctccatggaaaacgtaacaaaactttcaaagtctcttgcaaagtttctaatagtggtgaccaaaaccaaaacattgaaacgaattctgttgatcgaagaaatgttcttcttggcttaggaggtctttatggtgttgctaatgctataccattagcagcatcggctactcctataccatcccctgatctcaaaacttgtggtagagccaccatatcggatggtccactagtaccctatacttgttgcccccctcctatgccaactaactttgacaccattccatattacaagttcccttctatgactaaactccgtatccgtcccatgctgttgatgaggagtatattgctaagtataatttggccataagtcgaatgaaagatcttgataagacagaccctttaaaccctctt

SEQ ID NO: 2105 - DNA, 514 bp, Artificial
  Mutation introduced by TALE nuclease pair POT33_T03 within a POT33 allele
caagtgtgtgcaatagtagttctactactacaactctcaaaactcctttcatttcatccaatacttctttaggttccactcctaagcccctctcaacttttcctccatggaaaacgtaacaaaactttcaaagtctcttgcaaagtttctaatagtggtgaccaaaaccaaaacattgaaacgaattctgttgatcgaagaaatgttcttcttggcttaggaggtctttatggtgttgctaatgctataccattagcagcatcggctactcctataccatcccctgatctcaaaacttgtggtagagccaccatatcggatggtccactagtaccctatacttgttgcccccctcctatgccaactaactttgacaccattccatattacaagttcccttctatgactaaactccttatccgctcatgctgttgatgaggagtatattgctaagtataatttggccataagtcgaatgaaagatcttgataagacagaccctttaaaccctctt

SEQ ID NO: 2106 - DNA, 450 bp, Artificial
  Mutation introduced by TALE nuclease pair POT33_T03 within a POT33 allele
caagtgtgtgcaatagtagttctactactacaactctcaaaactcctttcatttcatccaatacttctttaggttccactcctaagcccctctcaacttttcctccatggaaaacgtaacaaaactttcaaagtctcttgcaaagtttctaatagtggtgaccaaaaccaaaacattgaaacgaattctgttgatcgaagaaatgttcttcttggcttaggaggtctttatggtgttgctaatgctataccattagcagcatcggctactcctataccatcccctgatctcaaaacttgtggtagagccaccatatcggatggtccactagtaccctatacttgttgcccccctcctatgccaactaactttgtacaccacttccatattcacaagtttcccttccttatgactaaactccagtatccgtccccttttttctgccgttcg

SEQ ID NO: 2107 - DNA, 484 bp, Artificial
  Mutation introduced by TALE nuclease pair POT33_T03 within a POT33 allele
caagtgtgtgcaatagtagttctactactacaactctcaaaactcctttcatttcatccaatacttctttaggttccactcctaagcccctctcaacttttcctccatggaaaacgtaacaaaactttcaaagtctcttgcaaagtttctaatagtggtgaccaaaaccaaaacattgaaacgaattctgttgatcgaagaaatgttcttcttggcttaggaggtctttatggtgttgctaatgctataccattagcagcatcggctactcctataccatcccctgatctcaaaacttgtggtagagccaccatatcggatggtccactagtaccctatacttgttgcccccctcctatgccaactaactttgacaccattccatattacaacccatgctgttgatgaggagtatattgctaagtataatttggccataagtcgaatgaaagatcttgataagacagaccctttaaaccctctt

SEQ ID NO: 2108 - DNA, 579 bp, Artificial
  Mutation introduced by TALE nuclease pair POT33_T03 within a POT33 allele
caagtgtgtgcaatagtaattctactactacaactctcaaaactcctttcatttcatccaatacttctttaggttccactcctaagccctctcaacttttcctccatggaaaacgtaacaaaactttcaaagtctcttgcaaagtttctaatagtggtgaccaaaaccaaaacattgaaacgaattctgttgatcgaagaaatgttcttcttggcttaggaggtctttatggtgttgctaatgctataccattagcagcatcggctactcctataccatcccctgatctcaaaacttgtggtagagccaccatatcggatggtccactagtaccctatacttgttgcccccctcctatgccaactaactttgacaccattccatattacaagttttacggcttgaccccctagcaggtggtggcccatcgccagcaatggcggtggcaagcaggcgctggagacggtccagcggctgttgccggtgctgtgccaggctcatgctgttgatgaggagtatattgctaagtataatttggccatgaagtcgaatgaaagatcttgataagacagacccttt

SEQ ID NO: 2109 - DNA, 519 bp, Artificial
  Mutation introduced by TALE nuclease pair POT33_T03 within a POT33 allele
caagtgtgtgcaatagtagttctactactacaactctcaaaactcctttcatttcatccaatacttctttaggttccactcctaagcccctctcaacttttcctccatggaaaacgtaacaaaactttcaaagtctcttgcaaagtttctaatagtggtgaccaaaaccaaaacattgaaacgaattctgttgatcgaagaaatgttcttcttggcttaggaggtctttatggtgttgctaatgctataccattagcagcatcggctactcctataccatcccctgatctcaaaacttgtggtagagccaccatatcggatggtccactagtaccctatacttgttgcccccctcctatgccaactaactttgacaccattccatattacaagttcccttctatgactaaactccgtatccgtcccgctcatgctgttgatgaggagtatattgctaagtataatttggccataagtcgaatgaaagatcttgataagacagaccctttaaaccctctt

SEQ ID NO: 2110 - DNA, 449 bp, Artificial
  Mutation introduced by TALE nuclease pair POT33_T03 within a POT33 allele
caagtgtgtgcaatagtagttctactactacaactctcaaaactcctttcatttcatccaatacttctttaggttccactcctaagccctctcaacttttcctccatggaaaacgtaacaaaactttcaaagtctcttgcaaagtttctaatagtggtgaccaaaaccaaaacattgaaacgaattctgttgatcgaagaaatgttcttcttggcttaggaggtctttatggtgttgctaatgctataccattagcagcatcggctactcctataccatcccctgatctcaaaacttgtggtagagccaccatatcggatggtccactagtaccctatacttgttgcccccctcctatgccaactaactttgacaccattccatataagtataatttggccataagtcgaatgaaagatcttgataagacagaccctttaaaccctctt

SEQ ID NO: 2111 - DNA, 477 bp, Artificial
  Mutation introduced by TALE nuclease pair POT33_T03 within a POT33 allele
caagtgtgtgcaatagtagttctactactacaactctcaaaactcctttcatttcatccaatacttctttaggttccactcctaagccctctcaacttttcctccatggaaaacgtaacaaaactttcaaagtctcatgcaaagtttctaatagtggtgaccaaaaccaaaacattgaaacgaattctgttgatcgaagaaatgttcttcttggcttaggaggtctttatggtgttgctaatgctataccattagcagcatcggctactcctataccatcccctgatctcaaaacttgtggtagagccaccatatcggatggtccactagtaccctatacttgttgcccccctcctcatgccaactaactttgtacaccacttccatatcacaagtctcatcttgttgattgaggaggtatattgtcccaagtacaattttggcaattagtcgaatgaaagatcttgataagacaga

SEQ ID NO: 2112 - DNA, 512 bp, Artificial
  Mutation introduced by TALE nuclease pair POT33_T03 within a POT33 allele
caagtgtgtgcaatagtagttctactactacaactctcaaaactcctttcatttcatccaatacttctttaggttccactcctaagcccctctcaacttttcctccatggaaaacgtaacaaaactttcaaagtctcttgcaaagtttctaatagtggtgaccaaaaccaaaacattgaaacgaattctgttgatcgaagaaatgttcttcttggcttaggaggtctttatggtgttgctaatgctataccattagcagcatcggctactcctataccatcccctgatctcaaaacttgtggtagagccaccatatcggatggtccactagtaccctatacttgttgcccccctcctatgccaactaactttgacaccattccatattacaagttcccttctatgactaaactccgtatccgtatgctgttgatgaggagtatattgctaagtataatttggccataagtcgaatgaaagatcttgataagacagaccctttaaaccctctt

SEQ ID NO: 2113 - DNA, 430 bp, Artificial
  Mutation introduced by TALE nuclease pair POT33_T03 within a POT33 allele
caagtgtgtgcaatagtagttctactactacaactctcaaaactcctttcatttcatccaatacttctttaggttccactcctaagcccctctcaacttttcctccatggaaaacgtaacaaaactttcaaagtctcatgcaaagtttcgaatagtggtgaccaaaaccaaaacgttgaaacgaattctgttgatcgaagaaatgttcttcttggtttaggaggtctatatggtgttgctaatgctataccattagcagcatcggcactcctataccatcccctgatctcaaaacttgtggtagagccaccatatcggatggtccactagtaccctatacttgttgccccctcatgctgttgatgaggagtatattgctaagtataattttggccataagtcgaatgaaagatcttgataagacagaccc

SEQ ID NO: 2114 - DNA, 478 bp, Artificial
  Mutation introduced by TALE nuclease pair POT33_T03 within a POT33 allele
caagtgtgtgcaatagtagttctactactacaactctcaaaactcctttcatttcatccaatacttctttaggttccactcctaagcccctctcaacttttcctccatggaaaacgtaacaaaactttcaaagtctcttgcaaagtttctaatagtggtgaccaaaaccaaaacattgaaacgaattctgttgatcgaagaaatgttcttcttggcttaggaggtctttatggtgttgctaatgctataccattagcagcatcggctactcctataccatcccctgatctcaaaacttgtggtagagccaccatatcggatggtccactagtaccctatacttgttgcccccctcctatgccaactaactttgacaccattccatattacaagttcccttctatgactaaactccgtatccgattgctaagtataatttggccataagtcgaatgaaagatcttgataagacagaccc

SEQ ID NO: 2115 - DNA, 510 bp, Artificial
  Mutation introduced by TALE nuclease pair POT33_T03 within a POT33 allele
caagtgtgtgcaatagtagttctactactacaactctcaaaactcctttcatttcatccaatacttctttaggttccactcctaagccctctcaacttttcctccatggaaaacgtaacaaaactttcaaagtctcttgcaaagtttctaatagtggtgaccaaaaccaaaacattgaaacgaattctgttgatcgaagaaatgttcttcttggcttaggaggtctttatggtgttgctaatgctataccattagcagcatcggctactcctataccatcccctgatcccaaaacttgtggtagagccaccatatcggatggtccactagtaccctatacttgttgcccccctcctatgccaactaactttgacaccattccatattacaagttcccttctatgactaaactccgtatccgtgctgttgatgaggagtatattgctaagtataatttgggccataagtcgaatgaaagatcttgataagacagaccctttaaaccctctt

SEQ ID NO: 2116 - DNA, 501 bp, Artificial
  Mutation introduced by TALE nuclease pair POT33_T03 within a POT33 allele
caagtgtgtgcaatagtagttctactactacaactctcaaaactcctttcatttcatccaatacttctttaggttccactcctaagcccctctcaacttttcctccatggaaaacgtaacaaaactttcaaagtctcttgcaaagtttctaatagtggtgaccaaaaccaaaacattgaaacgaattctgttgatcgaagaaatgttcttcttggcttaggaggtctttatggtgttgctaatgctataccattagcagcatcggctactcctataccatcccctgatctcaaaacttgtggtagagccaccatatcggatggtccactagtaccctatacttgttgcccccctcctatgccaactaactttgacaccattccatattacaagttcccttctatgactaaactccgtatccgttcatgctgttgatgaggagtatattgctaagtataatttggccataagtcgaatgaaagatcttgataagacagaccc

SEQ ID NO: 2117 - DNA, 518 bp, Artificial
  Mutation introduced by TALE nuclease pair POT33_T03 within a POT33 allele
caagtgtgtgcaatagtagttctactactacaactctcaaaactcctttcatttcatccaatacttctttaggttccactcctaagccctctcaacttttcctccatggaaaacgtaacaaaactttcaaagtctcatgcaaagtttcgaatagtggtgaccaaaaccaaaacgttgaaacgaattctgttgatcgaagaaatgttcttcttggtttaggaggtctatatggtgttgctaatgctataccattagcagcatcggcaactcctataccatcccctgatctcaaaacttgtggtagagccaccatatcggatggtccactagtaccctatacttgttgccccctcctatgccaactaacttttgacaccattccatattacaagttcccttctatgactaaactccgtatccgttccctgctcatgctgttgatgaggagtatattgctaagtataatttggccataagtcgaatgaaagatcttgataaaacagaaccgttaaaccctc

SEQ ID NO: 2118 - DNA, 463 bp, Artificial
  Mutation introduced by TALE nuclease pair POT33_T03 within a POT33 allele
caagtgtgtgcaatagtagttctactactacaactctcaaaactcctttcatttcatccaatacttctttaggttccactcctaagccctctcaacttttcctccatggaaaacgtaacaaaactttcaaagtctcttgcaaagtttctaatagtggtgaccaaaaccaaaacattgaaacgaattctgttgatcgaagaaatgttcttcttggcttaggaggtctttatggtgttgctaatgctataccattagcagcatcggctactcctataccatcccctgatctcaaaacttgtggtagagccaccatatcggatggtccactagtaccctatacttgttgcccccctcctatgccaactaactttgacaccattccatattacaagttcccttgctaagtataatttggccataagtcgaatgaaagatcttgataagacagacccttttaaaccct

SEQ ID NO: 2119 - DNA, 506 bp, Artificial
  Mutation introduced by TALE nuclease pair POT33_T03 within a POT33 allele
caagtgtgtgcaatagtagttctactactacaactctcaaaactcctttcatttcatccaatacttctttaggttccactcctaagcccctctcaacttttcctccatggaaaacgtaacaaaactttcaaagtctcttgcaaagtttctaatagtggtgaccaaaaccaaaacattgaaacgaattctgttgatcgaagaaatgttcttcttggcttaggaggtctttatggtgttgctaatgctataccattagcagcatcggctactcctataccatcccctgatctcaaaacttgtggtagagccaccatatcggatggtccactagtaccctatacttgttgcccccctcctatgccaactaactttgacaccattccatattacaagttccttctatgactaaactccgtattgctgttgatgaggagtatattgctaagtataatttggccataagtcgaatgaaagatcttgataagacagaccctttaaaccctctt

SEQ ID NO: 2120 - DNA, 514 bp, Artificial
  Mutation introduced by TALE nuclease pair POT33_T03 within a POT33 allele
caagtgtgtgcaatagtagttctactactacaactctcaaaactcctttcatttcatccaatacttctttaggttccactcctaagcccctctcaacttttcctccatggaaaacgtaacaaaactttcaaagtctcttgcaaagtttctaatagtggtgaccaaaaccaaaacattgaaacgaattctgttgatcgaagaaatgttcttcttggcttaggaggtctttatggtgttgctaatgctataccattagcagcatcggctactcctataccatcccctgatctcaaaacttgtggtagagccaccatatcggatggtccactagtaccctatacttgttgcccccctcctatgccaactaactttgacaccattccatattacaagttcccttctatgactaaactccgtatccgtccatgctgttgatgaggagtatattgctaagtataatttggccataagtcgaatgaaagatcttgataagacagaccctttaaaccctctt

SEQ ID NO: 2121 - DNA, 477 bp, Artificial
  Mutation introduced by TALE nuclease pair POT33_T03 within a POT33 allele
caagtgtgtgcaatagtagttctactactacaactctcaaaactcctttcatttcatccaatacttctttaggttccactcctaagcccctctcaacttttcctccatggaaaacgtaacaaaactttcaaagtctcttgcaaagtttctaatagtggtgaccaaaaccaaaacattgaaacgaattctgttgatcgaagaaatgttcttcttggcttaggaggtctttatggtgttgctaatgctataccattagcagcatcggctactcctataccatcccctgatctcaaaacttgtggtagagccaccatatcggatggtccactagtaccctatacttgttgcccccctcctatgccaactaactttgacaccattccatattctcatcaagttgccatccttaaatgaccttaaccgtccatccggttaccattccggcttgcccctttggatcgatggacgattgcatta

SEQ ID NO: 2122 - DNA, 511 bp, Artificial
  Mutation introduced by TALE nuclease pair POT33_T03 within a POT33 allele
caagtgtgtgcaatagtagttctactactacaactctcaaaactcctttcatttcatccaatacttctttaggttccactcctaagcccctctcaacttttcctccatggaaaacgtaacaaaactttcaaagtctcttgcaaagtttctaatagtggtgaccaaaaccaaaacattgaaacgaattctgttgatcgaagaaatgttcttcttggcttaggaggtctttatggtgttgctaatgctataccattagcagcatcggctactcctataccatcccctgatctcaaaacttgtggtagagccaccatatcggatggtccactagtaccctatacttgttgcccccctcctatgccaactaactttgacaccattccatattacaagttcccttctatgactaaactccgtatccgttgctgttgatgaggagtatattgctaagtataatttggccataagtcgaatgaaagatcttgataagacagaccctttaaaccctctt

SEQ ID NO: 2123 - DNA, 454 bp, Artificial
  Mutation introduced by TALE nuclease pair POT33_T03 within a POT33 allele
caagtgtgtgcaatagtagttctactactacaactctcaaaactcctttcatttcatccaatacttctttaggttccactcctaagccctctcaacttttcctccatggaaaacgtaacaaaactttcaaagtctcttgcaaagtttctaatagtggtgaccaaaaccaaaacattgaaacgaattctgttgatcgaagaaatgttcttcttggcttaggaggtctttatggtgttgctaatgctataccattagcagcatcggctactcctataccatcccctgatctcaaaacttgtggtagagccaccatatcggatggtccactagtaccctatacttgttgcccccctcctatgccaactaacttttgtacaccacttccatattcacaagttcccttccttatgactaaactccagtatccgttgctgttgatgaggagtatattgct

SEQ ID NO: 2124 - DNA, 514 bp, Artificial
  Mutation introduced by TALE nuclease pair POT33_T03 within a POT33 allele
caagtgtgtgcaatagtagttctactactacaactctcaaaactcctttcatttcatccaatacttctttaggttccactcctaagcccctctcaacttttcctccatggaaaacgtaacaaaactttcaaagtctcttgcaaagtttctaatagtggtgaccaaaaccaaaacattgaaacgaattctgttgatcgaagaaatgttcttcttggcttaggaggtctttatggtgttgctaatgctataccattagcagcatcggctactcctataccatcccctgatctcaaaacttgtggtagagccaccatatcggatggtccactagtaccctatacttgttgcccccctcctatgccaactaactttgtacaccattccattattcacaagttctatgactaaactccgtatccgtcctcatgctgttgatgaggagtatattgctaagtataatttggccataagtcgaatgaaagatcttgataagacagaccctttaaaccctctt

SEQ ID NO: 2125 - DNA, 516 bp, Artificial
  Mutation introduced by TALE nuclease pair POT33_T03 within a POT33 allele
caagtgtgtgcaatagtagttctactactacaactctcaaaactcctttcatttcatccaatacttctttaggttccactcctaagccctctcaacttttcctccatggaaaacgtaacaaaactttcaaagtctcttgcaaagtttctaatagtggtgaccaaaaccaaaacattgaaacgaattctgttgatcgaagaaatgttcttcttggcttaggaggtctttatggtgttgctaatgctataccattagcagcatcggctactcctataccatcccctgatctcaaaacttgtggtagagccaccatatcggatggtccactagtaccctatacttgttgcccccctcctatgccaactaactttgacaccattccatattacaagttcccttctatgactaaactccgtatccgtcgctcatgctgttgatgaggagtatattgctaagtataatttggccataagtcgaatgaaagatcttgataagacagaccctttaaaccctctt

SEQ ID NO: 2126 - DNA, 502 bp, Artificial
  Mutation introduced by TALE nuclease pair POT33_T03 within a POT33 allele
caagtgtgtgcaatagtagttctactactacaactctcaaaactcctttcatttcatccaatacttctttaggttccactcctaagcccctctcaacttttcctccatggaaaacgtaacaaaactttcaaagtctcttgcaaagtttctaatagtggtgaccaaaaccaaaacattgaaacgaattctgttgatcgaagaaatgttcttcttggcttaggaggtctttatggtgttgctaatgctataccattagcagcatcggctactcctataccatcccctgatctcaaaacttgtggtagagccaccatatcggatggtccactagtaccctatacttgttgcccccctcctatgccaactaactttgacaccattccatattacaagttcccttctatgactaaactccgtatccgtcccatgctgttgatgaggagtatattgctaagtataatttggccataagtcgaatgaaagatcttgataagacagaccc

SEQ ID NO: 2127 - DNA, 513 bp, Artificial
  Mutation introduced by TALE nuclease pair POT33_T03 within a POT33 allele
caagtgtgtgcaatagtagttctactactacaactctcaaaactcctttcatttcatccaatacttctttaggttccactcctaagcccctctcaacttttcctccatggaaaacgtaacaaaactttcaaagtctcttgcaaagtttctaatagtggtgaccaaaaccaaaacattgaaacgaattctgttgatcgaagaaatgttcttcttggcttaggaggtctttatggtgttgctaatgctataccattagcagcatcggctactcctataccatcccctgatctcaaaacttgtggtagagccaccatatcggatggtccactagtaccctatacttgttgcccccctcctatgccaactaactttgacaccattccatattacaagttcccttctatgactaaactccgtatccgtcctgctgttgatgaggagtatattgctaagtataatttggccataagtcgaatgaaagatcttgataagacagaccctttaaaccctctt

SEQ ID NO: 2128 - DNA, 519 bp, Artificial
  Mutation introduced by TALE nuclease pair POT33_T03 within a POT33 allele
caagtgtgtgcaatagtagttctactactacaactctcaaaactcctttcatttcatccaatacttctttaggttccactcctaagccctctcaacttttcctccatggaaaacgtaacaaaactttcaaagtctcatgcaaagtttcgaatagtggtgaccaaaaccaaaacgttgaaacgaattctgttgatcgaagaaatgttcttcttggtttaggaggtctatatggtgttgctaatgctataccattagcagcatcggcaactcctataccatcccctgatctcaaaacttgtggtagagccaccatatcggatggtccactagtaccctatacttgttgccccctcctatgccaactaactttgacaccattccatattacaagttcccttctatgactaaactccgtatccgttccctgctcatgctgttgatgaggagtatattgctaagtataatttggccataagtcgaatgaaagatcttgataaaacagaaccgttaaaccctctt

SEQ ID NO: 2129 - DNA, 469 bp, Artificial
  Mutation introduced by TALE nuclease pair POT33_T03 within a POT33 allele
caagtgtgtgcaatagtagttctactactacaactctcaaaactcctttcatttcatccaatacttctttaggttccactcctaagccctctcaacttttcctccatggaaaacgtaacaaaactttcaaagtctcttgcaaagtttctaatagtggtgaccaaaaccaaaacattgaaacgaattctgttgatcgaagaaatgttcttcttggcttaggaggtctttatggtgttgctaatgctataccattagcagcatcggctactcctataccatcccctgatctcaaaacttgtggtagagccaccatatcggatggtccactagtaccctatacttgttgcccccctcctatgccaactaactttgacaccattccagctcatgctgttgatgaggagtatattgctaagtataatttggccataagtcgaatgaaagatcttgataagacagaccctttaaa

SEQ ID NO: 2130 - DNA, 590 bp, Artificial
  Mutation introduced by TALE nuclease pair POT33_T03 within a POT33 allele
caagtgtgtgcaatagtaattctactactacaactctcaaaactcctttcatttcatccaatacttctttaggttccactcctaagccctctcaacttttcctccatggaaaacgtaacaaaactttcaaagtctcttgcaaagtttctaatagtggtgaccaaaaccaaaacattgaaacgaattctgttgatcgaagaaatgttcttcttggcttaggaggtctttatggtgttgctaatgctataccattagcagcatcggctactcctataccatcccctgatctcaaaacttgtggtagagccaccatatcggatggtccactagtaccctatacttgttgcccccctcctatgccaactaactttgacaccattccatattacaagttttacggtcttgaccccctacgcaggtggtggcctcatcgccagcaatggcggtggcaagcaggcgctgagacggtccagcggctgttgccggtgctgtgccaggctcatgctgttgatgaggagtatattgctaaggtataatttggccatgaagtcgaatgaaagatcttgataagacagaccctttaaaccctc

SEQ ID NO: 2131 - DNA, 520 bp, Artificial
  Mutation introduced by TALE nuclease pair POT33_T03 within a POT33 allele
caagtgtgtgcaatagtagttctactactacaactctcaaaactcctttcatttcatccaatacttctttaggttccactcctaagcccctctcaacttttcctccatggaaaacgtaacaaaactttcaaagtctcttgcaaagtttctaatagtggtgaccaaaaccaaaacattgaaacgaattctgttgatcgaagaaatgttcttcttggcttaggaggtctttatggtgttgctaatgctataccattagcagcatcggctactcctataccatcccctgatctcaaaacttgtggtagagccaccatatcggatggtccactagtaccctatacttgttgcccccctcctatgccaactaactttgtacaccattccattattcacaagttcccttcctatgactaaactccagtatcctgtcatgctgttgatgaggagtatattgctaagtataatttggccataagtcgaatgaaagatcttgataagacagacccttttaaaccctctt

SEQ ID NO: 2132 - DNA, 472 bp, Artificial
  Mutation introduced by TALE nuclease pair POT33_T03 within a POT33 allele
caagtgtgtgcaatagtagttctactactacaactctcaaaactcctttcatttcatccaatacttctttaggttccactcctaagcccctctcaacttttcctccatggaaaacgtaacaaaactttcaaagtctcttgcaaagtttctaatagtggtgaccaaaaccaaaacattgaaacgaattctgttgatcgaagaaatgttcttcttggcttaggaggtctttatggtgttgctaatgctataccattagcagcatcggctactcctataccatcccctgatctcaaaacttgtggtagagccaccatatcggatggtccactagtaccctatacttgttgcccccctcctatgccaactaactttgacatccattcatatgcttcatcttgttgatgaggagttactattgccaagtatgcaattttgcaattagtcgaatgaaagatcttgataagacagaccc

SEQ ID NO: 2133 - DNA, 516 bp, Artificial
  Mutation introduced by TALE nuclease pair POT33_T03 within a POT33 allele
caagtgtgtgcaatagtagttctactactacaactctcaaaactcctttcatttcatccaatacttctttaggttccactcctaagcccctctcaacttttcctccatggaaaacgtaacaaaactttcaaagtctcttgcaaagtttctaatagtggtgaccaaaaccaaaacattgaaacgaattctgttgatcgaagaaatgttcttcttggcttaggaggtctttatggtgttgctaatgctataccattagcagcatcggctactcctataccatcccctgatctcaaaacttgtggtagagccaccatatcggatggtccactagtaccctatacttgttgcccccctcctatgccaactaactttgacaccattccatattacaagttcccttctatgactaaactccgtatccgtccccatgctgttgatgaggagtatattgctaagtataatttggccataagtcgaatgaaagatcttgataagacagaccctttaaaccctctt

SEQ ID NO: 2134 - DNA, 515 bp, Artificial
  Mutation introduced by TALE nuclease pair POT33_T03 within a POT33 allele
caagtgtgtgcaatagtagttctactactacaactctcaaaactcctttcatttcatccaatacttctttaggttccactcctaagccctctcaacttttcctccatggaaaacgtaacaaaactttcaaagtctcttgcaaagtttctaatagtggtgaccaaaaccaaaacattgaaacgaattctgttgatcgaagaaatgttcttcttggcttaggaggtctttatggtgttgctaatgctataccattagcagcatcggctactcctataccatcccctgatctcaaaacttgtggtagagccaccatatcggatggtccactagtaccctatacttgttgcccccctcctatgccaactaactttgacaccattccatattacaagttcccttctatgactaaactccgtatccgtccatgctgttgatgtaggagtatattgctaagtataatttggccataagtcgaatgaaagatcttgataagacagacccttttaaaccctctt

SEQ ID NO: 2135 - DNA, 471 bp, Artificial
  Mutation introduced by TALE nuclease pair POT33_T03 within a POT33 allele
caagtgtgtgcaatagtagttctactactacaactctcaaaactcctttcatttcatccaatacttctttaggttccactcctaagccctctcaacttttcctccatggaaaacgtaacaaaactttcaaagtctcttgcaaagtttctaatagtggtgaccaaaaccaaaacattgaaacgaattctgttgatcgaagaaatgttcttcttggcttaggaggtctttatggtgttgctaatgctataccattagcagcatcggctactcctataccatcccctgatctcaaaacttgtggtagagccaccatatcggatggtccactagtaccctatacttgttgcccccctcctatgccaactaactttgacaccattccatattacaactcatgctgttgatgaggagtatattgctaagtataattttggccataagtcgaatgaaagatcttgataagacagaccc

SEQ ID NO: 2136 - DNA, 491 bp, Artificial
  Mutation introduced by TALE nuclease pair POT33_T03 within a POT33 allele
caagtgtgtgcaatagtagttctactactacaactctcaaaactcctttcatttcatccaatacttctttaggttccactcctaagcccctctcaacttttcctccatggaaaacgtaacaaaactttcaaagtctcatgcaaagtttctaatagtggtgaccaaaaccaaaacattgaaacgaattctgttgatcgaagaaatgttcttcttggcttaggaggtctttatggtgttgctaatgctataccattagcagcatcggctactcctataccatcccctgatctcaaaacttgtggtagagccaccatatcggatggtccactagtaccctatacttgttgcccccctcctatgccaactaactttgacaccattccatattacaagtcccctcatcttgttgatgaggagtatattgccaagtacaatttggcaattagtcgaatgaaagatcttgataagacagaccctttaaaccctcttgg

SEQ ID NO: 2137 - DNA, 514 bp, Artificial
  Mutation introduced by TALE nuclease pair POT33_T03 within a POT33 allele
caagtgtgtgcaatagtagttctactactacaactctcaaaactcctttcatttcatccaatacttctttaggttccactcctaagcccctctcaacttttcctccatggaaaacgtaacaaaactttcaaagtctcttgcaaagtttctaatagtggtgaccaaaaccaaaacattgaaacgaattctgttgatcgaagaaatgttcttcttggcttaggaggtctttatggtgttgctaatgctataccattagcagcatcggctactcctataccatcccctgatctcaaaacttgtggtagagccaccatatcggatggtccactagtaccctatacttgttgcccccctcctatgccaactaactttgacaccattccatattacaagttcccttctatgactaaactccgtatccgtcccatctgttgatgaggagtatattgctaagtataatttggccataagtcgaatgaaagatcttgataagacagaccctttaaaccctctt

SEQ ID NO: 2138 - DNA, 428 bp, Artificial
  Mutation introduced by TALE nuclease pair POT33_T03 within a POT33 allele
caagtgtgtgcaatagtagttctactactacaactctcaaaactcctttcatttcatccaatacttctttaggttccactcctaagccctctcaacttttcctccatggaaaacgtaacaaaactttcaaagtctcttgcaaagtttctaatagtggtgaccaaaaccaaaacattgaaacgaattctgttgatcgaagaaatgttcttcttggcttaggaggtctttatggtgttgctaatgctataccattagcagcatcggctactcctataccatcccctgatctcaaaacttgtggtagagccaccatatcggatggtccactagtaccctatacttgttgcccccctcctatgccaactaactttgacaccattccatattacaagaaagatcttgataagacagaccctttaaaccctctt

SEQ ID NO: 2139 - DNA, 483 bp, Artificial
  Mutation introduced by TALE nuclease pair POT33_T03 within a POT33 allele
caagtgtgtgcaatagtagttctactactacaactctcaaaactcctttcatttcatccaatacttctttaggttccactcctaagccctctcaacttttcctccatggaaaacgtaacaaaactttcaaagtctcttgcaaagtttctaatagtggtgaccaaaaccaaaacattgaaacgaattctgttgatcgaagaaatgttcttcttggcttaggaggtctttatggtgttgctaatgctataccattagcagcatcggctactcctataccatcccctgatctcaaaacttgtggtagagccaccatatcggatggtccactagtaccctatacttgttgcccccctcctatgccaactaactttgacaccattccatattacaagtcatgctgttgatgaggagtatattgctaagtataatttggccataagtcgaatgaaagatcttgataagacagaccctttaaaccctctt

SEQ ID NO: 2140 - DNA, 518 bp, Artificial
  Mutation introduced by TALE nuclease pair POT33_T03 within a POT33 allele
caagtgtgtgcaatagtagttctactactacaactctcaaaactcctttcatttcatccaatacttctttaggttccactcctaagcccctctcaacttttcctccatggaaaacgtaacaaaactttcaaagtctcttgcaaagtttctaatagtggtgaccaaaaccaaaacattgaaacgaattctgttgatcgaagaaatgttcttcttggcttaggaggtctttatggtgttgctaatgctataccattagcagcatcggctactcctataccatcccctgatctcaaaacttgtggtagagccaccatatcggatggtccactagtaccctatacttgttgcccccctcctatgccaactaactttgacaccattccatattcacaagttcccttcctatgactaaactccagtatccgtctcatgctgttgatgaggagtatattgctaagtataatttggccataagtcgaatgaaagatcttgataagacagaccctttaaaccctctt

SEQ ID NO: 2141 - DNA, 511 bp, Artificial
  Mutation introduced by TALE nuclease pair POT33_T03 within a POT33 allele
caagtgtgtgcaatagtagttctactactacaactctcaaaactcctttcatttcatccaatacttctttaggttccactcctaagcccctctcaacttttcctccatggaaaacgtaacaaaactttcaaagtctcttgcaaagtttctaatagtggtgaccaaaaccaaaacattgaaacgaattctgttgatcgaagaaatgttcttcttggcttaggaggtctttatggtgttgctaatgctataccattagcagcatcggctactcctataccatcccctgatctcaaaacttgtggtagagccaccatatcggatggtccactagtaccctatacttgttgcccccctcctatgccaactaactttgacaccattccatattacaagttcccttctatgactaaactccgtatccgtcgctgttgatgaggagtatattgctaagtataatttggccataagtcgaatgaaagatcttgataagacagaccctttaaaccctctt

SEQ ID NO: 2142 - DNA, 428 bp, Artificial
  Mutation introduced by TALE nuclease pair POT33_T03 within a POT33 allele
caagtgtgtgcaatagtagttctactactacaactctcaaaactcctttcatttcatccaatacttctttaggttccactcctaagccctctcaacttttcctccatggaaaacgtaacaaaactttcaaagtctcttgcaaagtttctaatagtggtgaccaaaaccaaaacattgaaacgaattctgttgatcgaagaaatgttcttcttggcttaggaggtctttatggtgttgctaatgctataccattagcagcatcggctactcctataccatcccctgatctcaaaacttgtggtagagccaccatatcggatggtccactagtaccctatacttgttgatgaggagtatattgctaagtataatttgggccataagtcgaatgaaagatcttgataagacagaccctttaaaccctctgg

SEQ ID NO: 2143 - DNA, 511 bp, Artificial
  Mutation introduced by TALE nuclease pair POT33_T03 within a POT33 allele
caagtgtgtgcaatagtagttctactactacaactctcaaaactcctttcatttcatccaatacttctttaggttccactcctaagcccctctcaacttttcctccatggaaaacgtaacaaaactttcaaagtctcttgcaaagtttctaatagtggtgaccaaaaccaaaacattgaaacgaattctgttgatcgaagaaatgttcttcttggcttaggaggtctttatggtgttgctaatgctataccattagcagcatcggctactcctataccatcccctgatctcaaaacttgtggtagagccaccatatcggatggtccactagtaccctatacttgttgcccccctcctatgccaactaactttgacaccattccatattacaagttcccttctatgactaaactccgtatccgtccctgttgatgaggagtatattgctaagtataatttggccataagtcgaatgaaagatcttgataagacagaccctttaaaccctctt

SEQ ID NO: 2144 - DNA, 519 bp, Artificial
  Mutation introduced by TALE nuclease pair POT33_T03 within a POT33 allele
caagtgtgtgcaatagtagttctactactacaactctcaaaactcctttcatttcatccaatacttctttaggttccactcctaagcccctctcaacttttcctccatggaaaacgtaacaaaactttcaaagtctcttgcaaagtttctaatagtggtgaccaaaaccaaaacattgaaacgaattctgttgatcgaagaaatgttcttcttggcttaggaggtctttatggtgttgctaatgctataccattagcagcatcggctactcctataccatcccctgatctcaaaacttgtggtagagccaccatattcgggatggctccactagtaccctatacttgttgcccccctcctatgccaactaactttgacaccattccatattacaagttcccttctatgactaaactccgtatccgtcctgatgctgttgatgaggagtatattgctaagtataatttggccataagtcgaatgaaagatcttgataagacagaccctttaaaccctctt

SEQ ID NO: 2145 - DNA, 449 bp, Artificial
  Mutation introduced by TALE nuclease pair POT33_T03 within a POT33 allele
caagtgtgtgcaatagtagttctactactacaactctcaaaactcctttcatttcatccaatacttctttaggttccactcctaagcccctctcaacttttcctccatggaaaacgtaacaaaactttcaaagtctcttgcaaagtttctaatagtggtgaccaaaaccaaaacattgaaacgaattctgttgatcgaagaaatgttcttcttggcttaggaggtctttatggtgttgctaatgctataccattagcagcatcggctactcctataccatcccctgatctcaaaacttgtggtagagccaccatatcggatggtccactagtaccctatacttgttgcccccctcctcatgccaactaactttagtacaccacttccattattcacaagtttcccattccttatgactaaactcagtactccgtccatctgcttgatgt

SEQ ID NO: 2146 - DNA, 515 bp, Artificial
  Mutation introduced by TALE nuclease pair POT33_T03 within a POT33 allele
  misc_feature (424): n is a or c or t or g
caagtgtgtgcaatagtagttctactactacaactctcaaaactcctttcatttcatccaatacttctttaggttccactcctaagcccctctcaacttttcctccatggaaaacgtaacaaaactttcaaagtctcttgcaaagtttctaatagtggtgaccaaaaccaaaacattgaaacgaattctgttgatcgaagaaatgttcttcttggcttaggaggtctttatggtgttgctaatgctataccattagcagcatcggctactcctataccatcccctgatctcaaaacttgtggtagagccaccatatcggatggtccactagtaccctatacttgttgcccccctcctatgccaactaactttgacaccattccatattacaagttcccttctatgactaaactccgtatccgtntcatgctgttgatgaggagtatattgctaagtataatttggccataagtcgaatgaaagatcttgataagacagaccctttaaaccctctt

SEQ ID NO: 2147 - DNA, 517 bp, Artificial
  Mutation introduced by TALE nuclease pair POT33_T03 within a POT33 allele
caagtgtgtgcaatagtagttctactactacaactctcaaaactcctttcatttcatccaatacttctttaggttccactcctaagccctctcaacttttcctccatggaaaacgtaacaaaactttcaaagtctcttgcaaagtttctaatagtggtgaccaaaaccaaaacattgaaacgaattctgttgatcgaagaaatgttcttcttggcttaggaggtctttatggtgttgctaatgctataccattagcagcatcggctactcctataccatcccctgatctcaaaacttgtggtagagccaccatatcggatggtccactagtaccctatacttgttgcccccctcctatgccaactaactttgacaccattccatattacaagttcccttctatgactaaactccgtatccgtccctcatgctgttgatgaggagtatattgctaaagtataatttggccataagtcgaatgaaagatcttgataagacagaccctttaaaccctctt

SEQ ID NO: 2148 - DNA, 513 bp, Artificial
  Mutation introduced by TALE nuclease pair POT33_T03 within a POT33 allele
caagtgtgtgcaatagtagttctactactacaactctcaaaactcctttcatttcatccaatacttctttaggttccactcctaagcccctctcaacttttcctccatggaaaacgtaacaaaactttcaaagtctcttgcaaagtttctaatagtggtgaccaaaaccaaaacattgaaacgaattctgttgatcgaagaaatgttcttcttggcttaggaggtctttatggtgttgctaatgctataccattagcagcatcggctactcctataccatcccctgatctcaaaacttgtggtagagccaccatatcggatggtccactagtaccctatacttgttgcccccctcctatgccaactaactttgtacaccacttccatattcacaagtttcccttccttatgactaaactccagtactccgtccctcatgcctgttgatgaggagtatattgctaagtataatttggccataagtcgaatgaaagatcttgataagacagaccc

SEQ ID NO: 2149 - DNA, 496 bp, Artificial
  Mutation introduced by TALE nuclease pair POT33_T03 within a POT33 allele
  misc_feature (478): n is a or c or t or g
caagtgtgtgcaatagtagttctactactacaactctcaaaactcctttcatttcatccaatacttctttaggttccactcctaagcccctctcaacttttcctccatggaaaacgtaacaaaactttcaaagtctcttgcaaagtttctaatagtggtgaccaaaaccaaaacattgaaacgaattctgttgatcgaagaaatgttcttcttggcttaggaggtctttatggtgttgctaatgctataccattagcagcatcggctactcctataccatcccctgatctcaaaacttgtggtagagccaccatatcggatggtccactagtaccctatacttgttgcccccctcctatgccaactaactttgacaccattccatattacaagttcccttctatgactaaactccgtatccgtcctgttgatgaggagtattattgctaagtataattttgggcccataaagtcgaangaaagatcttgataagac

SEQ ID NO: 2150 - DNA, 500 bp, Artificial
  Mutation introduced by TALE nuclease pair POT33_T03 within a POT33 allele
caagtgtgtgcaatagtagttctactactacaactctcaaaactcctttcatttcatccaatacttctttaggttccactcctaagccctctcaacttttcctccatggaaaacgtaacaaaactttcaaagtctcttgcaaagtttctaatagtggtgaccaaaaccaaaacattgaaacgaattctgttgatcgaagaaatgttcttcttggcttaggaggtctttatggtgttgctaatgctataccattagcagcatcggctactcctataccatcccctgatctcaaaacttgtggtagagccaccatatcggatggtccactagtaccctatacttgttgcccccctcctatgccaactaactttgacaccattccatattacaagttcccttctatgactaaactccgtatccgtcctgttgatgaggagtatattgctaagtataatttgggccataagtcgaatgaaagatcttgataagacagacccttt

SEQ ID NO: 2151 - DNA, 580 bp, Artificial
  Mutation introduced by TALE nuclease pair POT33_T03 within a POT33 allele
caagtgtgtgcaatagtagttctactactacaactctcaaaactcctttcatttcatccaatacttctttaggttccactcctaagccctctcaacttttcctccatggaaaacgtaacaaaactttcaaagtctcttgcaaagtttctaatagtggtgaccaaaaccaaaacactgaaacgaattctgttgatcgaagaaatgttcttcttggcttaggaggtctttatggtgttgctaatgctataccattagcagcatcggctactcctataccatcccctgatctcaaaacttgtggtagagccaccatatcggatggtccactagtaccctatacttgttgcccccctcctatgccaactaactttgacaccattccatattacaagttcccttctatgactaaactccgtatgtccggccacttcaaggggcaactacaaggcccagctgaccaggctgaaccacatcaccaactgcaacggcgccgtgctgctcatgctgttgatgaggagtatattgctaagtataatttggccataagtcgaatgaaagatcttgataagacagacccttt

SEQ ID NO: 2152 - DNA, 469 bp, Artificial
  Mutation introduced by TALE nuclease pair POT33_T03 within a POT33 allele
caagtgtgtgcaatagtagttctactactacaactctcaaaactcctttcatttcatccaatacttctttaggttccactcctaagcccctctcaacttttcctccatggaaaacgtaacaaaactttcaaagtctcttgcaaagtttctaatagtggtgaccaaaaccaaaacattgaaacgaattctgttgatcgaagaaatgttcttcttggcttaggaggtctttatggtgttgctaatgctataccattagcagcatcggctactcctataccatcccctgatctcaaaacttgtggtagagccaccatatcggatggtccactagtaccctatacttgttgcccccctcctatgccaactaactttgacaccattccatattacaagatgctgttgatgaggagtatattgctaagtataatttggccataagtcgaatgaaagatcttgataagacagaccc

SEQ ID NO: 2153 - DNA, 510 bp, Artificial
  Mutation introduced by TALE nuclease pair POT33_T03 within a POT33 allele
caagtgtgtgcaatagtagttctactactacaactctcaaaactcctttcatttcatccaatacttctttaggttccactcctaagcccctctcaacttttcctccatggaaaacgtaacaaaactttcaaagtctcttgcaaagtttctaatagtggtgaccaaaaccaaaacattgaaacgaattctgttgatcgaagaaatgttcttcttggcttaggaggtctttatggtgttgctaatgctataccattagcagcatcggctactcctataccatcccctgatctcaaaacttgtggtagagccaccatatcggatggtccactagtaccctatacttgttgcccccctcctatgccaactaactttgacaccattccatattacaagttcccttctatgactaaactccgtatctcatgctgttgatgaggagtatattgctaagtataatttggccataagtcgaatgaaagatcttgataagacagaccctttaaaccctct

SEQ ID NO: 2154 - DNA, 577 bp, Artificial
  Mutation introduced by TALE nuclease pair POT33_T03 within a POT33 allele
caagtgtgtgcaatagtagttctactactacaactctcaaaactcctttcatttcatccaatacttctttaggttccactcctaagccctctcaacttttcctccatggaaaacgtaacaaaactttcaaagtctcttgcaaagtttctaatagtggtgaccaaaaccaaaacactgaaacgaattctgttgatcgaagaaatgttcttcttggcttaggaggtctttatggtgttgctaatgctataccattagcagcatcggctactcctataccatcccctgatctcaaaacttgtggtagagccaccatatcggatggtccactagtaccctatacttgttgcccccctcctatgccaactaactttgacaccattccatattacaagttcccttctatgactaaactccgtatgtccggccacttcaagggcaactacaaggcccagctgaccaggctgaaccacatcaccaactgcaacggcgccgtgctgctcatgctgttgatgagggagtatattgctaagtataatttggccataagtcgaatgaaagatcttgataagacagaccc

SEQ ID NO: 2155 - DNA, 531 bp, Artificial
  Mutation introduced by TALE nuclease pair POT33_T03 within a POT33 allele
caagtgtgtgcaatagtagttctactactacaactctcaaaactcctttcatttcatccaatacttctttaggttccactcctaagcccctctcaacttttcctccatggaaaacgtaacaaaactttcaaagtctcttgcaaagtttctaatagtggtgaccaaaaccaaaacattgaaacgaattctgttgatcgaagaaatgttcttcttggcttaggaggtctttatggtgttgctaatgctataccattagcagcatcggctactcctataccatcccctgatctcaaaacttgtggtagagccaccatatcggatggtccactagtaccctatacttgttgcccccctcctatgccaactaactttgacaccattccatattacaagttcccttctatgactaaactccgtatccgtcctctgctgttgtatgaggaggtagtattgcattgcatgatgtataaatttttgggcccataaagtcgaatgaaagtcttgataagacagacccttttaaaccctctt

SEQ ID NO: 2156 - DNA, 503 bp, Artificial
  Mutation introduced by TALE nuclease pair POT33_T03 within a POT33 allele
caagtgtgtgcaatagtagttctactactacaactctcaaaactcctttcatttcatccaatacttctttaggttccactcctaagccctctcaacttttcctccatggaaaacgtaacaaaactttcaaagtctcatgcaaagtttctaatagtggtgaccaaaaccaaaacattgaaacgaattctgttgatcgaagaaatgttcttcttggcttaggaggtctttatggtgttgctaatgctataccattagcagcatcggctactcctataccatcccctgatctcaaaacttgtggtagagccaccatatcggatggtccactagtaccctatacttgttgcccccctcctatgccaactaactttgacaccattccatattacaagttcccttctatgactaaactccgtatccgtccttgttgatgaggagtatattgccaagtacaatttggcaattagtcgaatgaaagatcttgataagacagaccctttaaa

SEQ ID NO: 2157 - DNA, 515 bp, Artificial
  Mutation introduced by TALE nuclease pair POT33_T03 within a POT33 allele
caagtgtgtgcaatagtagttctactactacaactctcaaaactcctttcatttcatccaatacttctttaggttccactcctaagcccctctcaacttttcctccatggaaaacgtaacaaaactttcaaagtctcttgcaaagtttctaatagtggtgaccaaaaccaaaacattgaaacgaattctgttgatcgaagaaatgttcttcttggcttaggaggtctttatggtgttgctaatgctataccattagcagcatcggctactcctataccatcccctgatctcaaaacttgtggtagagccaccatatcggatggtccactagtaccctatacttgttgcccccctcctatgccaactaactttgacaccattccatattacaagttcccttctatgactaaactccgtatccgtcccctgctgttgatgaggagtatattgctaagtataatttggccataagtcgaatgaaagatcttgataagacagaccctttaaaccctctt

SEQ ID NO: 2158 - DNA, 578 bp, Artificial
  Mutation introduced by TALE nuclease pair POT33_T03 within a POT33 allele
caagtgtgtgcaatagtagttctactactacaactctcaaaactcctttcatttcatccaatacttctttaggttccactcctaagccctctcaacttttcctccatggaaaacgtaacaaaactttcaaagtctcttgcaaagtttctaatagtggtgaccaaaaccaaaacactgaaacgaattctgttgatcgaagaaatgttcttcttggcttaggaggtctttatggtgttgctaatgctataccattagcagcatcggctactcctataccatcccctgatctcaaaacttgtggtagagccaccatatcggatggtccactagtaccctatacttgttgcccccctcctatgccaactaactttgacaccattccatattacaagttcccttctatgactaaactccgtatgtcggccacttcaaggggcaactacaaggcccagctgaccaggctgaaccacatcaccaactgcaacggcgccgtgctgctcatgctgttgatgagggagtatatttgctaagtataatttggccataagtcgaatgaaagatcttgataagacagaccc

SEQ ID NO: 2159 - DNA, 522 bp, Artificial
  Mutation introduced by TALE nuclease pair POT33_T03 within a POT33 allele
caagtgtgtgcaatagtagttctactactacaactctcaaaactcctttcatttcatccaatacttctttaggttccactcctaagcccctctcaacttttcctccatggaaaacgtaacaaaactttcaaagtctcttgcaaagtttctaatagtggtgaccaaaaccaaaacattgaaacgaattctgttgatcgaagaaatgttcttcttggcttaggaggtctttatggtgttgctaatgctataccattagcagcatcggctactcctataccatcccctgatctcaaaacttgtggtagagccaccatatcggatggtccactagtaccctatacttgttgcccccctcctatgccaactaactttgacaccattccatattacaagttcccttctatgactaaactccgtatccgtaccctgtccatgctgttgatgagggagtatattgctaagtataatttggccataagtcgaatgaaagatcttgataagacagaccctttaaaccctctt

SEQ ID NO: 2160 - DNA, 464 bp, Artificial
  Mutation introduced by TALE nuclease pair POT33_T03 within a POT33 allele
caagtgtgtgcaatagtagttctactactacaactctcaaaactcctttcatttcatccaatacttctttaggttccactcctaagcccctctcaacttttcctccatggaaaacgtaacaaaactttcaaagtctcttgcaaagtttctaatagtggtgaccaaaaccaaaacattgaaacgaattctgttgatcgaagaaatgttcttcttggcttaggaggtctttatggtgttgctaatgctataccattagcagcatcggctactcctataccatcccctgatctcaaaacttgtggtagagccaccatatcggatggtccactagtaccctatacttgttgcccccctcctatgccaactaactttgacaccattccatattacaagtcatgctgttgatgaggagtatattgctaagtataattttggccataatgtcgaatgaaagatcttgataa

SEQ ID NO: 2161 - DNA, 452 bp, Artificial
  Mutation introduced by TALE nuclease pair POT33_T03 within a POT33 allele
caagtgtgtgcaatagtagttctactactacaactctcaaaactcctttcatttcatccaatacttctttaggttccactcctaagccctctcaacttttcctccatggaaaacgtaacaaaactttcaaagtctcttgcaaagtttctaatagtggtgaccaaaaccaaaacattgaaacgaattctgttgatcgaagaaatgttcttcttggcttaggaggtctttatggtgttgctaatgctataccattagcagcatcggctactcctataccatcccctgatctcaaaacttgtggtagagccaccatatcggatggtccactagtaccctatacttgttgcccccctcctatgccaactaactttgacaccattccatattacaagttcccttctatgactaaactccgtatccgtcctcatgctgttgatgaggagtatattgct

SEQ ID NO: 2162 - DNA, 510 bp, Artificial
  Mutation introduced by TALE nuclease pair POT33_T03 within a POT33 allele
caagtgtgtgcaatagtagttctactactacaactctcaaaactcctttcatttcatccaatacttctttaggttccactcctaagcccctctcaacttttcctccatggaaaacgtaacaaaactttcaaagtctcttgcaaagtttctaatagtggtgaccaaaaccaaaacattgaaacgaattctgttgatcgaagaaatgttcttcttggcttaggaggtctttatggtgttgctaatgctataccattagcagcatcggctactcctataccatcccctgatctcaaaacttgtggtagagccaccatatcggatggtccactagtaccctatacttgttgcccccctcctatgccaactaactttgacaccattccatattacaagttcccttctatgactaaactccgtatccgtgctgttgatgaggagtatattgctaagtataatttggccataagtcgaatgaaagatcttgataagacagaccctttaaaccctctt

SEQ ID NO: 2163 - DNA, 528 bp, Artificial
  Mutation introduced by TALE nuclease pair POT33_T03 within a POT33 allele
caagtgtgtgcaatagtagttctactactacaactctcaaaactcctttcatttcatccaatacttctttaggttcaactcctaagcccctctcaacttttcctccatggaaaacgtaacaaaactttcaaagtctcttgcaaagtttctaatagtggtgaccaaaaccaaaacattgaaacgaattctgttgatcgaagaaatgttcttcttggcttaggaggtctttatggtgttgctaatgctataccattagcagcatcggctactcctataccatcccctgatctcaaaacttgtggtagagccaccatatcggatggtccactagtaccctatacttgttgcccccctcctcatgccaactaactttgtacaccacttccattattcacaagtttcccttcctatgactaaactccagtactccgtccatgctgcttgatgtaggagtatattgcttaagtataattttgggccataagtcgaatgaaagatcttgataagacagaccctttaaaccctctt

SEQ ID NO: 2164 - DNA, 429 bp, Artificial
  Mutation introduced by TALE nuclease pair POT33_T03 within a POT33 allele
caagtgtgtgcaatagtagttctactactacaactctcaaaactcctttcatttcatccaatacttctttaggttccactcctaagcccctctcaacttttcctccatggaaaacgtaacaaaactttcaaagtctcttgcaaagtttctaatagtggtgaccaaaaccaaaacattgaaacgaattctgttgatcgaagaaatgttcttcttggcttaggaggtctttatggtgttgctaatgctataccattagcagcatcggctactcctataccatcccctgatctcaaaacttgtggtagagccaccatatcggatggtccactagtaccctatacttgttgcccccctcctatgccaactaactttgacaccattccatattacaagaaagatcttgataagacagaccctttaaaccctctt

SEQ ID NO: 2165 - DNA, 492 bp, Artificial
  Mutation introduced by TALE nuclease pair POT33_T03 within a POT33 allele
caagtgtgtgcaatagtagtctactactacaactctcaaaactcctttcatttcatccaatacttctttaggttccactcctaagccctctcaacttttcctccatggaaaacgtaacaaaactttcaaagtctcttgcaaagtttctaatagtggtgaccaaaaccaaaacattgaaacgaattctgttgatcgaaagaaatgttcttcttggcttaggaggtctttatggtgttgctaatgctataccattagcagcatcggctactcctataccatcccctgatctcaaaacttgtggtagagccaccatatcggatggtccactagtaccctatacttgttgcccccctcctatgccaactaactttgacaccattccatattacaagttcccttctatgactaaactccgtatccgtttgatgaggagtatattgctaagtataatttggccataagtcgaatgaaagatcttgataagacagaccc

SEQ ID NO: 2166 - DNA, 523 bp, Artificial
  Mutation introduced by TALE nuclease pair POT33_T03 within a POT33 allele
caagtgtgtgcaatagtagttctactactacaactctcaaaactcctttcatttcatccaatacttctttaggttccactcctaagcccctctcaacttttcctccatggaaaacgtaacaaaactttcaaagtctcttgcaaagtttctaatagtggtgaccaaaaccaaaacattgaaacgaattctgttgatcgaagaaatgttcttcttggcttaggaggtctttatggtgttgctaatgctataccattagcagcatcggctactcctataccatcccctgatctcaaaacttgtggtagagccaccatatcggatggtccactagtaccctatacttgttgcccccctcctatgccaactaactttgtacaccacttccatattcacaagttcccttcctatgactaaactccagtactctcatgctgttgatgtagggagtagtattgcttaagatataatttggccataagtcgaatgaaagatcttgataagacagacccttttaaaccctctt

SEQ ID NO: 2167 - DNA, 431 bp, Artificial
  Mutation introduced by TALE nuclease pair POT33_T03 within a POT33 allele
caagtgtgtgcaatagtagttctactactacaactctcaaaactcctttcatttcatccaatacttctttaggttccactcctaagcccctctcaacttttcctccatggaaaacgtaacaaaactttcaaagtctcatgcaaagtttctaatagtggtgaccaaaaccaaaacattgaaacgaattctgttgatcgaagaaatgttcttcttggcttaggaggtctttatggtgttgctaatgctataccattagcagcatcggctactcctataccatcccctgatctcaaaacttgtggtagagccaccatatcggatggtccactagtaccctatacttgttgcccccctcctatgccaactaagtacaatttggcaattagtcgaatgaaagatcttgataagacagaccctttaaaccctcttgg

SEQ ID NO: 2168 - DNA, 518 bp, Artificial
  Mutation introduced by TALE nuclease pair POT33_T03 within a POT33 allele
caagtgtgtgcaatagtagttctactactacaactctcaaaactcctttcatttcatccaatacttctttaggttccactcctaagcccctctcaacttttcctccatggaaaacgtaacaaaactttcaaagtctcttgcaaagtttctaatagtggtgaccaaaaccaaaacattgaaacgaattctgttgatcgaagaaatgttcttcttggcttaggaggtctttatggtgttgctaatgctataccattagcagcatcggctactcctataccatcccctgatctcaaaacttgtggtagagccaccatatcggatggtccactagtaccctatacttgttgcccccctcctatgccaactaactttgacaccattccatattacaagttcccttctatgactaaactccgtatccgtcccctcatgctgttgatgaggagtatattgctaagtataatttggccataagtcgaatgaaagatcttgataagacagaccctttaaaccctctt

SEQ ID NO: 2169 - DNA, 502 bp, Artificial
  Mutation introduced by TALE nuclease pair POT33_T03 within a POT33 allele
caagtgtgtgcaatagtagttctactactacaactctcaaaactcctttcatttcatccaatacttctttaggttccactcctaagccctctcaacttttcctccatggaaaacgtaacaaaactttcaaagtctcttgcaaagtttctaatagtggtgaccaaaaccaaaacattgaaacgaattctgttgatcgaagaaatgttcttcttggcttaggaggtctttatggtgttgctaatgctataccattagcagcatcggctactcctataccatcccctgatctcaaaacttgtggtagagccaccatatcggatggtccactagtaccctatacttgttgcccccctcctatgccaactaactttgacaccattccatattacaagttcccttctatgactaaactccgtatccgtcctcatgctgttgatgaggagtatattgctaagtataatttggccataagtcgaatgaaagatcttgataagacagaccc

SEQ ID NO: 2170 - DNA, 509 bp, Artificial
  Mutation introduced by TALE nuclease pair POT33_T03 within a POT33 allele
caagtgtgtgcaatagtagttctactactacaactctcaaaactcctttcatttcatccaatacttctttaggttccactcctaagccctctcaacttttcctccatggaaaacgtaacaaaactttcaaagtctcttgcaaagtttctaatagtggtgaccaaaaccaaaacattgaaacgaattctgttgatcgaagaaatgttcttcttggcttaggaggtctttatggtgttgctaatgctataccattagcagcatcggctactcctataccatcccctgatctcaaaacttgtggtagagccaccatatcggatggtccactagtaccctatacttgttgcccccctcctatgccaactaactttgacaccattccatattacaagttcccttctatgactaaactccgtatccgtccccttgatgaggagtatattgctaagtataatttggccataagtcgaatgaaagatcttgataagacagaccctttaaaccctctt

SEQ ID NO: 2171 - DNA, 519 bp, Artificial
  Mutation introduced by TALE nuclease pair POT33_T03 within a POT33 allele
caagtgtgtgcaatagtagttctactactacaactctcaaaactcctttcatttcatccaatacttctttaggttccactcctaagccctctcaacttttcctccatggaaaacgtaacaaaactttcaaagtctcttgcaaagtttctaatagtggtgaccaaaaccaaaacattgaaacgaattctgttgatcgaagaaatgttcttcttggcttaggaggtctttatggtgttgctaatgctataccattagcagcatcggctactcctataccatcccctgatctcaaaacttgtggtagagccaccatattgcgggatggctccactagtaccctatacttgttgcccccctcctatgccaactaactttgacaccattccatattacaagttcccttctatgactaaactccgtatccgtcctgatgctgttgatgaggagtatattgctaagtataatttggccataagtcgaatgaaagatcttgataagacagaccctttaaaccctctt

SEQ ID NO: 2172 - DNA, 460 bp, Artificial
  Mutation introduced by TALE nuclease pair POT33_T03 within a POT33 allele
caagtgtgtgcaatagtagttctactactacaactctcaaaactcctttcatttcatccaatacttctttaggttccactcctaagcccctctcaacttttcctccatggaaaacgtaacaaaactttcaaagtctcttgcaaagtttctaatagtggtgaccaaaaccaaaacattgaaacgaattctgttgatcgaagaaatgttcttcttggcttaggaggtctttatggtgttgctaatgctataccattagcagcatcggctactcctataccatcccctgatctcaaaacttgtggtagagccaccatatcggatggtccactagtaccctatacttgttgcccccctcctatgccaactaactttgacaccattcctgaggagtatattgctaagtataatttggccataagtcgaatgaaagatcttgataagacagacccttttaaaccct

SEQ ID NO: 2173 - DNA, 516 bp, Artificial
  Mutation introduced by TALE nuclease pair POT33_T03 within a POT33 allele
caagtgtgtgcaatagtagttctactactacaactctcaaaactcctttcatttcatccaatacttctttaggttccactcctaagccctctcaacttttcctccatggaaaacgtaacaaaactttcaaagtctcttgcaaagtttctaatagtggtgaccaaaaccaaaacattgaaacgaattctgttgatcgaagaaatgttcttcttggcttaggaggtctttatggtgttgctaatgctataccattagcagcatcggctactcctataccatcccctgatctcaaaacttgtggtagagccaccatatcggatggtccactagtaccctatacttgttgcccccctcctatgccaactaactttgacaccattccatattacaagtttcccttctatgactaaactccgtatccgtcctcatgctgttgatgaggagtatattgctaagtataatttggccataagtcgaatgaaagatcttgataagacagaccctttaaaccctctt

SEQ ID NO: 2174 - DNA, 515 bp, Artificial
  Mutation introduced by TALE nuclease pair POT33_T03 within a POT33 allele
caagtgtgtgcaatagtagttctactactacaactctcaaaactcctttcatttcatccaatacttctttaggttccactcctaagccctctcaacttttcctccatggaaaacgtaacaaaactttcaaagtctcttgcaaagtttctaatagtggtgaccaaaaccaaaacattgaaacgaattctgttgatcgaagaaatgttcttcttggcttaggaggtctttatggtgttgctaatgctataccattagcagcatcggctactcctataccatcccctgatctcaaaacttgtggtagagccaccatatcggatggtccactagtaccctatacttgttgcccccctcctatgccaactaactttgacaccattccatattacaagttcccttctatgactaaactccgtatccgtcctcatgctgttgatgaggagtatattgctaagtataatttggccataagtcgaatgaaagatcttgataagacagaccctttaaaccctctt

SEQ ID NO: 2175 - DNA, 494 bp, Artificial
  Mutation introduced by TALE nuclease pair POT33_T03 within a POT33 allele
caagtgtgtgcaatagtagttctactactacaactctcaaaactcctttcatttcatccaatacttctttaggttccactcctaagcccctctcaacttttcctccatggaaaacgtaacaaaactttcaaagtctcttgcaaagtttctaatagtggtgaccaaaaccaaaacattgaaacgaattctgttgatcgaagaaatgttcttcttggcttaggaggtctttatggtgttgctaatgctataccattagcagcatcggctactcctataccatcccctgatctcaaaacttgtggtagagccaccatatcggatggtccactagtaccctatacttgttgcccccctcctatgccaactaactttgacaccattccatattacaagttcctgctcatgctgttgatgaggagtatattgctaagtataattttggccataagtcgaatgaaagatcttgataaaacagaaccgttaaaccctcttgg

SEQ ID NO: 2176 - DNA, 501 bp, Artificial
  Mutation introduced by TALE nuclease pair POT33_T03 within a POT33 allele
caagtgtgtgcaatagtagttctactactacaactctcaaaactcctttcatttcatccaatacttctttaggttccactcctaagcccctctcaacttttcctccatggaaaacgtaacaaaactttcaaagtctcatgcaaagtttcgaatagtggtgaccaaaaccaaaacgttgaaacgaattctgttgatcgaagaaatgttcttcttggtttaggaggtctatatggtgttgctaatgctataccattagcagcatcggcaactcctataccatcccctgatctcaaaacttgtggtagagccaccatatcggatggtccactagtaccctatacttgttgccccctcctatgccaactaacttttgacaccattccatattacaagttcccttctatgactaaactccgtatccgtttcatgctgttgatgaggagtatattgctaagtatatttggccataagtcgaatgaaagatcttgataagacagaccc

SEQ ID NO: 2177 - DNA, 513 bp, Artificial
  Mutation introduced by TALE nuclease pair POT33_T03 within a POT33 allele
caagtgtgtgcaatagtagttctactactacaactctcaaaactcctttcatttcatccaatacttctttaggttccactcctaagcccctctcaacttttcctccatggaaaacgtaacaaaactttcaaagtctcttgcaaagtttctaatagtggtgaccaaaaccaaaacattgaaacgaattctgttgatcgaagaaatgttcttcttggcttaggaggtctttatggtgttgctaatgctataccattagcagcatcggctactcctataccatcccctgatctcaaaacttgtggtagagccaccatatcggatggtccactagtaccctatacttgttgcccccctcctatgccaactaactttgacaccattccatattacaagttccttctatgactaaactccgtatccgtccatgctgttgatgaggagtatattgctaagtataatttggccataagtcgaatgaaagatcttgataagacagaccctttaaaccctctt

SEQ ID NO: 2178 - DNA, 510 bp, Artificial
  Mutation introduced by TALE nuclease pair POT33_T03 within a POT33 allele
caagtgtgtgcaatagtagttctactactacaactctcaaaactcctttcatttcatccaatacttctttaggttccactcctaagcccctctcaacttttcctccatggaaaacgtaacaaaactttcaaagtctcttgcaaagtttctaatagtggtgaccaaaaccaaaacattgaaacgaattctgttgatcgaagaaatgttcttcttggcttaggaggtctttatggtgttgctaatgctataccattagcagcatcggctactcctataccatcccctgatctcaaaacttgtggtagagccaccatatcggatggtccactagtaccctatacttgttgcccccctcctatgccaactaactttgacaccattccatattacaagttcccttctatgactaaactccgtatccgtccccttgatgaggagtatattgctaagtataatttggccataagtcgaatgaaagatcttgataagacagaccctttaaaccctctt

SEQ ID NO: 2179 - DNA, 524 bp, Artificial
  Mutation introduced by TALE nuclease pair POT33_T03 within a POT33 allele
caagtgtgtgcaatagtagttctactactacaactctcaaaactcctttcatttcatccaatacttctttaggttccactcctaagccctctcaacttttcctccatggaaaacgtaacaaaactttcaaagtctcttgcaaagtttctaatagtggtgaccaaaaccaaaacattgaaacgaattctgttgatcgaagaaatgttcttcttggcttaggaggtctttatggtgttgctaatgctataccattagcagcatcggctactcctataccatcccctgatctcaaaacttgtggtagagccaccatatcggatggtccactagtaccctatacttgttgcccccctcctatgccaactaactttgtacaccattccatattcacaagtttcccattccttatgactaaactccagtatccgtcccatgctgcttgatgtaggagtatattgctaagatataatttggccataagtcgaatgaaagatcttgataagacagaccctttaaaccctctt

SEQ ID NO: 2180 - DNA, 514 bp, Artificial
  Mutation introduced by TALE nuclease pair POT33_T03 within a POT33 allele
caagtgtgtgcaatagtagttctactactacaactctcaaaactcctttcatttcatccaatacttctttaggttccactcctaagccctctcaacttttcctccatggaaaacgtaacaaaactttcaaagtctcttgcaaagtttctaatagtggtgaccaaaaccaaaacattgaaacgaattctgttgatcgaagaaatgttcttcttggcttaggaggtctttatggtgttgctaatgctataccattagcagcatcggctactcctataccatcccctgatctcaaaacttgtggtagagccaccatatcggatggtccactagtaccctatacttgttgcccccctcctatgccaactaactttgacaccattccatattacaagcttcccttctatgactaaactccgtatccgtctgctgttgatgtaggagtatattgctaagtatcaatttggccataagtcgaatgaaagatcttgataagacagaccctttaaaccctctt

SEQ ID NO: 2181 - DNA, 510 bp, Artificial
  Mutation introduced by TALE nuclease pair POT33_T03 within a POT33 allele
caagtgtgtgcaatagtagttctactactacaactctcaaaactcctttcatttcatccaatacttctttaggttccactcctaagccctctcaacttttcctccatggaaaacgtaacaaaactttcaaagtctcttgcaaagtttctaatagtggtgaccaaaaccaaaacattgaaacgaattctgttgatcgaagaaatgttcttcttggcttaggaggtctttatggtgttgctaatgctataccattagcagcatcggctactcctataccatcccctgatctcaaaacttgtggtagagccaccatatcggatggtccactagtaccctatacttgttgcccccctcctatgccaactaactttgacaccattccatattacaagttcccttctatgactaaactccgtatccgttgctgttgatgaggagtatattgctaagtataatttggccataagtcgaatgaaagatcttgataagacagaccctttaaaccctctt

SEQ ID NO: 2182 - DNA, 505 bp, Artificial
  Mutation introduced by TALE nuclease pair POT33_T03 within a POT33 allele
caagtgtgtgcaatagtagttctactactacaactctcaaaactcctttcatttcatccaatacttctttaggttccactcctaagcccctctcaacttttcctccatggaaaacgtaacaaaactttcaaagtctcttgcaaagtttctaatagtggtgaccaaaaccaaaacattgaaacgaattctgttgatcgaagaaatgttcttcttggcttaggaggtctttatggtgttgctaatgctataccattagcagcatcggctactcctataccatcccctgatctcaaaacttgtggtagagccaccatattcggatggtccactagtaccctatacttgttgcccccctcctatgccaactaactttgacaccattccatattacaagttcccttctatgactaaactccgtatccgtccctgatgctgttgatgaggagtatattgctaagtataatttggccataagtcgaatgaaagatcttgataagacagaccc

SEQ ID NO: 2183 - DNA, 510 bp, Artificial
  Mutation introduced by TALE nuclease pair POT33_T03 within a POT33 allele
caagtgtgtgcaatagtagttctactactacaactctcaaaactcctttcatttcatccaatacttctttaggttccactcctaagcccctctcaacttttcctccatggaaaacgtaacaaaactttcaaagtctcttgcaaagtttctaatagtggtgaccaaaaccaaaacattgaaacgaattctgttgatcgaagaaatgttcttcttggcttaggaggtctttatggtgttgctaatgctataccattagcagcatcggctactcctataccatcccctgatctcaaaacttgtggtagagccaccatatcggatggtccactagtaccctatacttgttgcccccctcctagtgccaactaactttgacaccattccatattacaagttcccttctatgactaaactccgtatctatgctgttgatgaggagtatattgctaagtataatttggccataagtcgaatgaaagatcttgataagacagaccctttaaaccctct

SEQ ID NO: 2184 - DNA, 521 bp, Artificial
  Mutation introduced by TALE nuclease pair POT33_T03 within a POT33 allele
caagtgtgtgcaatagtagttctactactacaactctcaaaactcctttcatttcatccaatacttctttaggttccactcctaagccctctcaacttttcctccatggaaaacgtaacaaaactttcaaagtctcttgcaaagtttctaatagtggtgaccaaaaccaaaacattgaaacgaattctgttgatcgaagaaatgttcttcttggcttaggaggtctttatggtgttgctaatgctataccattagcagcatcggctactcctataccatcccctgatctcaaaacttgtggtagagccaccatatcggatggtccactagtaccctatacttgttgcccccctcctcatgccaactaacttttgtacaccacttccattattcacaagttcccttcctatgactaaactccagtatctcatgctgttgatgtagggagtatatttgctaagtataatttggccataagtcgaatgaaagatcttgataagacagaccctttaaaccctctt

SEQ ID NO: 2185 - DNA, 492 bp, Artificial
  Mutation introduced by TALE nuclease pair POT33_T03 within a POT33 allele
caagtgtgtgcaatagtagttctactactacaactctcaaaactcctttcatttcatccaatacttctttaggttccactcctaagcccctctcaacttttcctccatggaaaacgtaacaaaactttcaaagtctcttgcaaagtttctaatagtggtgaccaaaaccaaaacattgaaacgaattctgttgatcgaagaaatgttcttcttggcttaggaggtctttatggtgttgctaatgctataccattagcagcatcggctactcctataccatcccctgatctcaaaacttgtggtagagccaccatatcggatggtccactagtaccctatacttgttgcccccctcctatgccaactaactttgacaccattccatattacaagcttcccttctatgactaaactccgtatccgtcccatgctgttgatgaggagtatattgctaagtataatttggccataagtcgaatgaaagatcttgat

SEQ ID NO: 2186 - DNA, 484 bp, Artificial
  Mutation introduced by TALE nuclease pair POT33_T03 within a POT33 allele
caagtgtgtgcaatagtagttctactactacaactctcaaaactcctttcatttcatccaatacttctttaggttccactcctaagcccctctcaacttttcctccatggaaaacgtaacaaaactttcaaagtctcttgcaaagtttctaatagtggtgaccaaaaccaaaacattgaaacgaattctgttgatcgaagaaatgttcttcttggcttaggaggtctttatggtgttgctaatgctataccattagcagcatcggctactcctataccatcccctgatctcaaaacttgtggtagagccaccatatcggatggtccactagtaccctatacttgttgcccccctcctatgccaactaacttttgacaccattccatattacaagatgctgttgatgaggagtatattgctaagtataattttggccataagtcgaatgaaagatcttgataagacagaccctttaaaccctctt

SEQ ID NO: 2187 - DNA, 495 bp, Artificial
  Mutation introduced by TALE nuclease pair POT33_T03 within a POT33 allele
caagtgtgtgcaatagtagttctactactacaactctcaaaactcctttcatttcatccaatacttctttaggttccactcctaagccctctcaacttttcctccatggaaaacgtaacaaaactttcaaagtctcttgcaaagtttctaatagtggtgaccaaaaccaaaacattgaaacgaattctgttgatcgaagaaatgttcttcttggcttaggaggtctttatggtgttgctaatgctataccattagcagcatcggctactcctataccatcccctgatctcaaaacttgtggtagagccaccatatcggatggtccactagtaccctatacttgttgcccccctcctatgccaactaactttgacaccattccatattacaagttccctgctcatgctgttgatgaggagtatattgctaagtataattttcggccataagtcgaatgaaagatcttgataagacagaccctttaaaccctcttgg

SEQ ID NO: 2188 - DNA, 524 bp, Artificial
  Mutation introduced by TALE nuclease pair POT33_T03 within a POT33 allele
caagtgtgtgcaatagtagttctactactacaactctcaaaactcctttcatttcatccaatacttctttaggttccactcctaagcccctctcaacttttcctccatggaaaacgtaacaaaactttcaaagtctcttgcaaagtttctaatagtggtgaccaaaaccaaaacattgaaacgaattctgttgatcgaagaaatgttcttcttggcttaggaggtctttatggtgttgctaatgctataccattagcagcatcggctactcctataccatcccctgatctcaaaacttgtggtagagccaccatatcggatggtccactagtaccctatacttgttgcccccctcctcatgccaactaactttgtacaccacttccattattcacaagtttcccattttcattgactaaactccgtatccgctcatgctgttgatgtaggagtatattgctaagtataatttggccataagtcgaatgaaagatcttgataagacagaccctttaaaccctctt

SEQ ID NO: 2189 - DNA, 439 bp, Artificial
  Mutation introduced by TALE nuclease pair POT33_T03 within a POT33 allele
caagtgtgtgcaatagtagttctactactacaactctcaaaactcctttcatttcatccaatacttctttaggttccactcctaagcccctctcaacttttcctccatggaaaacgtaacaaaactttcaaagtctcttgcaaagtttctaatagtggtgaccaaaaccaaaacattgaaacgaattctgttgatcgaagaaatgttcttcttggcttaggaggtctttatggtgttgctaatgctataccattagcagcatcggctactcctataccatcccctgatctcaaaacttgtggtagagccaccatatcggatggtccactagtaccctatacttgttgcccccctcctatgccaactaactttgacaccattccatattacaagttcccttctatgatttgctaagtataatttggccataagtcgaatg

SEQ ID NO: 2190 - DNA, 511 bp, Artificial
  Mutation introduced by TALE nuclease pair POT33_T03 within a POT33 allele
caagtgtgtgcaatagtagttctactactacaactctcaaaactcctttcatttcatccaatacttctttaggttccactcctaagccctctcaacttttcctccatggaaaacgtaacaaaactttcaaagtctcttgcaaagtttctaatagtggtgaccaaaaccaaaacattgaaacgaattctgttgatcgaagaaatgttcttcttggcttaggaggtctttatggtgttgctaatgctataccattagcagcatcggctactcctataccatcccctgatctcaaaacttgtggtagagccaccatatcggatggtccactagtaccctatacttgttgcccccctcctatgccaactaactttgacaccattccatattacaagttcccttctatgactaaactccgtatccgtatgctgttgatgaggagtatattgctaagtataatttggccataagtcgaatgaaagatcttgataagacagaccctttaaaccctctt

SEQ ID NO: 2191 - DNA, 485 bp, Artificial
  Mutation introduced by TALE nuclease pair POT33_T03 within a POT33 allele
caagtgtgtgcaatagtagttctactactacaactctcaaaactcctttcatttcatccaatacttctttaggttccactcctaagcccctctcaacttttcctccatggaaaacgtaacaaaactttcaaagtctcttgcaaagtttctaatagtggtgaccaaaaccaaaacattgaaacgaattctgttgatcgaagaaatgttcttcttggcttaggaggtctttatggtgttgctaatgctataccattagcagcatcggctactcctataccatcccctgatctcaaaacttgtggtagagccaccatatcggatggtccactagtaccctatacttgttgcccccctcctatgccaactaactttgacaccattccatattacaagtcatcttgttgatgaggagtatattgccaagtacaattttggcaattagtcgaatgaaagatcttgataagacagaccctttaaaccctctt

SEQ ID NO: 2192 - DNA, 482 bp, Artificial
  Mutation introduced by TALE nuclease pair POT33_T03 within a POT33 allele
caagtgtgtgcaatagtagttctactactacaactctcaaaactcctttcatttcatccaatacttctttaggttccactcctaagcccctctcaacttttcctccatggaaaacgtaacaaaactttcaaagtctcttgcaaagtttctaatagtggtgaccaaaaccaaaacattgaaacgaattctgttgatcgaagaaatgttcttcttggcttaggaggtctttatggtgttgctaatgctataccattagcagcatcggctactcctataccatcccctgatctcaaaacttgtggtagagccaccatatcggatggtccactagtaccctatacttgttgcccccctcctatgccaactaactttgacaccattccatattacaagttccctgctcatgctgattgcatgaggagtcatattgctaagtataatttggtccataagtcgaatgaaagatcattgataagatcagg

SEQ ID NO: 2193 - DNA, 516 bp, Artificial
  Mutation introduced by TALE nuclease pair POT33_T03 within a POT33 allele
caagtgtgtgcaatagtagttctactactacaactctcaaaactcctttcatttcatccaatacttctttaggttccactcctaagcccctctcaacttttcctccatggaaaacgtaacaaaactttcaaagtctcttgcaaagtttctaatagtggtgaccaaaaccaaaacattgaaacgaattctgttgatcgaagaaatgttcttcttggcttaggaggtctttatggtgttgctaatgctataccattagcagcatcggctactcctataccatcccctgatctcaaaacttgtggtagagccaccatatcggatggtccactagtaccctatacttgttgcccccctcctatgccaactaactttgacaccattccatattacaagttcccttttcattgactaaactccgtatccgctcatgctgttgatgaggagtatattgctaagtataatttggccataagtcgaatgaaagatcttgataagacagaccctttaaaccctctt

SEQ ID NO: 2194 - DNA, 511 bp, Artificial
  Mutation introduced by TALE nuclease pair POT33_T03 within a POT33 allele
caagtgtgtgcaatagtagttctactactacaactctcaaaactcctttcatttcatccaatacttctttaggttccactcctaagcccctctcaacttttcctccatggaaaacgtaacaaaactttcaaagtctcttgcaaagtttctaatagtggtgaccaaaaccaaaacattgaaacgaattctgttgatcgaagaaatgttcttcttggcttaggaggtctttatggtgttgctaatgctataccattagcagcatcggctactcctataccatcccctgatctcaaaacttgtggtagagccaccatatcggatggtccactagtaccctatacttgttgcccccctcctatgccaactaactttgacaccattccatattacaagttctatgactaaactccgtatccgtccccatgctgttgatgaggagtatattgctaagtataatttggccataagtcgaatgaaagatcttgataagacagaccctttaaaccctctt

SEQ ID NO: 2195 - DNA, 535 bp, Artificial
  Mutation introduced by TALE nuclease pair POT33_T03 within a POT33 allele
caagtgtgtgcaatagtagttctactactacaactctcaaaactcctttcatttcatccaatacttctttaggttccactcctaagcccctctcaacttttcctccatggaaaacgtaacaaaactttcaaagtctcttgcaaagtttctaatagtggtgaccaaaaccaaaacattgaaacgaattctgttgatcgaagaaatgttcttcttggcttaggaggtctttatggtgttgctaatgctataccattagcagcatcggctactcctataccatcccctgatctcaaaacttgtggtagagccaccatatcggatggtccactagtaccctatacttgttgcccccctcctatgccaactaactttgacaccattccatattacaagttcccttctatgactaaactccgtatccgtcccctctgctgcttgtagtatggaggtagttattcttgcaatgatgtataaatttttgggccataaagttcgaatgaaagatcttgataagacagaccctttaaaccctctt

SEQ ID NO: 2196 - DNA, 511 bp, Artificial
  Mutation introduced by TALE nuclease pair POT33_T03 within a POT33 allele
caagtgtgtgcaatagtagttctactactacaactctcaaaactcctttcatttcatccaatacttctttaggttccactcctaagccctctcaacttttcctccatggaaaacgtaacaaaactttcaaagtctcttgcaaagtttctaatagtggtgaccaaaaccaaaacattgaaacgaattctgttgatcgaagaaatgttcttcttggcttaggaggtctttatggtgttgctaatgctataccattagcagcatcggctactcctataccatcccctgatctcaaaacttgtggtagagcaaccatatcggatggtccactagtaccctatacttgttgcccccctcctatgccaactaactttgacaccattccatattacaagttcccttctatgactaaactccgtatccgtccccgttgatgaggagtatattgctaagtataatttgggccataagtcgaatgaaagatcttgataagacagaccctttaaaccctctt

SEQ ID NO: 2197 - DNA, 479 bp, Artificial
  Mutation introduced by TALE nuclease pair POT33_T03 within a POT33 allele
caagtgtgtgcaatagtagttctactactacaactctcaaaactcctttcatttcatccaatacttctttaggttccactcctaagcccctctcaacttttcctccatggaaaacgtaacaaaactttcaaagtctcttgcaaagtttctaatagtggtgaccaaaaccaaaacattgaaacgaattctgttgatcgaagaaatgttcttcttggcttaggaggtctttatggtgttgctaatgctataccattagcagcatcggctactcctataccatcccctgatctcaaaacttgtggtagagccaccatatcggatggtccactagtaccctatacttgttgcccccctcctatgccaactaactttgacaccattccatattacaagttcttgatgaggagtatattgctaagtataatttggccataagtcgaatgaaagatcttgataagacagaccctttaaaccctctt

SEQ ID NO: 2198 - DNA, 502 bp, Artificial
  Mutation introduced by TALE nuclease pair POT33_T03 within a POT33 allele
caagtgtgtgcaatagtagttctactactacaactctcaaaactcctttcatttcatccaatacttctttaggttccactcctaagccctctcaacttttcctccatggaaaacgtaacaaaactttcaaagtctcttgcaaagtttctaatagtggtgaccaaaaccaaaacattgaaacgaattctgttgatcgaagaaatgttcttcttggcttaggaggtctttatggtgttgctaatgctataccattagcagcatcggctactcctataccatcccctgatctcaaaacttgtggtagagccaccatatcggatggtccactagtaccctatacttgttgcccccctcctatgccaactaactttgacaccattccatattacaagttcccttctatgactaaactccgtatccgtgctcatgctgttgatgaggagtatattgctaagtataatttggccataagtcgaatgaaagatcttgataagacagaccc

SEQ ID NO: 2199 - DNA, 510 bp, Artificial
  Mutation introduced by TALE nuclease pair POT33_T03 within a POT33 allele
caagtgtgtgcaatagtagttctactactacaactctcaaaactcctttcatttcatccaatacttctttaggttccactcctaagccctctcaacttttcctccatggaaaacgtaacaaaactttcaaagtctcttgcaaagtttctaatagtggtgaccaaaaccaaaacattgaaacgaattctgttgatcgaagaaatgttcttcttggcttaggaggtctttatggtgttgctaatgctataccattagcagcatcggctactcctataccatcccctgatctcaaaacttgtggtagagccaccatatcggatggtccactagtaccctatacttgttgcccccctcctatgccaactaactttgacaccattccatattacaagttcccttctatgactaaactccgtatctcatgctgttgatgaggagtatattgctaagtataatttggccataagtcgaatgaaagatcttgataagacagaccctttaaaccctctt

SEQ ID NO: 2200 - DNA, 509 bp, Artificial
  Mutation introduced by TALE nuclease pair POT33_T03 within a POT33 allele
caagtgtgtgcaatagtagttctactactacaactctcaaaactcctttcatttcatccaatacttctttaggttccactcctaagcccctctcaacttttcctccatggaaaacgtaacaaaactttcaaagtctcttgcaaagtttctaatagtggtgaccaaaaccaaaacattgaaacgaattctgttgatcgaagaaatgttcttcttggcttaggaggtctttatggtgttgctaatgctataccattagcagcatcggctactcctataccatcccctgatctcaaaacttgtggtagagccaccatatcggatggtccactagtaccctatacttgttgcccccctcctatgccaactaactttgacaccattccatattacaagttcccttctatgactaaactccgtatccgtcccctgatgaggagtatattgctaagtataatttggccataagtcgaatgaaagatcttgataagacagaccctttaaaccctctt

SEQ ID NO: 2201 - DNA, 464 bp, Artificial
  Mutation introduced by TALE nuclease pair POT33_T03 within a POT33 allele
caagtgtgtgcaatagtagttctactactacaactctcaaaactcctttcatttcatccaatacttctttaggttccactcctaagcccctctcaacttttcctccatggaaaacgtaacaaaactttcaaagtctcttgcaaagtttctaatagtggtgaccaaaaccaaaacattgaaacgaattctgttgatcgaagaaatgttcttcttggcttaggaggtctttatggtgttgctaatgctataccattagcagcatcggctactcctataccatcccctgatctcaaaacttgtggtagagccaccatatcggatggtccactagtaccctatacttgttgcccccctcctatgccaactaactttgacaccatcatcttgttgatgaggagtatattgccaagtacaatttggcaattagtcgaatgaaacgatcttgataagacagaccctttaaa

SEQ ID NO: 2202 - DNA, 514 bp, Artificial
  Mutation introduced by TALE nuclease pair POT33_T03 within a POT33 allele
caagtgtgtgcaatagtagttctactactacaactctcaaaactcctttcatttcatccaatacttctttaggttccactcctaagcccctctcaacttttcctccatggaaaacgtaacaaaactttcaaagtctcttgcaaagtttctaatagtggtgaccaaaaccaaaacattgaaacgaattctgttgatcgaagaaatgttcttcttggcttaggaggtctttatggtgttgctaatgctataccattagcagcatcggctactcctataccatcccctgatctcaaaacttgtggtagagccaccatatcggatggtccactagtaccctatacttgttgcccccctcctatgccaactaactttgacaccattccatattacaagttcccttctatgactaaactccgtatccgctcatgctgttgatgaggagtatattgctaagtataatttggccataagtcgaatgaaagatcttgataagacagaccctttaaaccctctt

SEQ ID NO: 2203 - DNA, 535 bp, Artificial
  Mutation introduced by TALE nuclease pair POT33_T03 within a POT33 allele
caagtgtgtgcaatagtagttctactactacaactctcaaaactcctttcatttcatccaatacttctttaggttccactcctaagcccctctcaacttttcctccatggaaaacgtaacaaaactttcaaagtctcttgcaaagtttctaatagtggtgaccaaaaccaaaacattgaaacgaattctgttgatcgaagaaatgttcttcttggcttaggaggtctttatggtgttgctaatgctataccattagcagcatcggctactcctataccatcccctgatctcaaaacttgtggtagagccaccatatcggatggtccactagtaccctatacttgttgcccccctcctcatgccaactaactttgtacaccacttccattattcacaagttcccttccttatgactaaactccagtatccggtccgctgttgatgtagggagtatattgcttaagatataaatttttgggcccataaagttcgaaatggaaaagtcttgataagacagacccttttaaaccctctt

SEQ ID NO: 2204 - DNA, 452 bp, Artificial
  Mutation introduced by TALE nuclease pair POT33_T03 within a POT33 allele
caagtgtgtgcaatagtagttctactactacaactctcaaaactcctttcatttcatccaatacttctttaggttccactcctaagcccctctcaacttttcctccatggaaaacgtaacaaaactttcaaagtctcttgcaaagtttctaatagtggtgaccaaaaccaaaacattgaaacgaattctgttgatcgaagaaatgttcttcttggcttaggaggtctttatggtgttgctaatgctataccattagcagcatcggctactcctataccatcccctgatctcaaaacttgtggtagagccaccatatcggatggtccactagtaccctatacttgttgcccccctcctatgccaactaactttgacaccattccatattacaagttcccttctatgactaaactccgtatccgtccccttgatgaggagtatatttgctaagt

SEQ ID NO: 2205 - DNA, 484 bp, Artificial
  Mutation introduced by TALE nuclease pair POT33_T03 within a POT33 allele
caagtgtgtgcaatagtagttctactactacaactctcaaaactcctttcatttcatccaatacttctttaggttccactcctaagccctctcaacttttcctccatggaaaacgtaacaaaactttcaaagtctcttgcaaagtttctaatagtggtgaccaaaaccaaaacattgaaacgaattctgttgatcgaagaaatgttcttcttggcttaggaggtctttatggtgttgctaatgctataccattagcagcatcggctactcctataccatcccctgatctcaaaacttgtggtagagccaccatatcggatggtccactagtaccctatacttgttgcccccctcctatgccaactaactttgacaccattccatattacaagctcatgctgttgatgaggagtatattgctaagtataatttggccataagtcgaatgaaagatcttgataagacagaccctttaaaccctctt

SEQ ID NO: 2206 - DNA, 564 bp, Artificial
  Mutation introduced by TALE nuclease pair POT33_T03 within a POT33 allele
caagtgtgtgcaatgtagttctactactacaactctcaaaactcctttcatttcatccaatacttctttaggttccactcctaagcccctctcaacttttcctccatggaaaacgtaacaaaactttcaaagtctcttgcaaagtttctaatagtggtgaccaaaaccaaaacattgaaacgaattctgttgatcgaagaaatgttcttcttggcttaggaggtctttatggtgttgctaatgctataccattagcagcatcggctactcctataccatcccctgatctcaaaacttgtggtagagccaccatatcggatggtccactagtaccctatacttgttgcccccctcctatgccaactaactttgacaccattccatattacaagttcccttctatgactaaacaggcgctggagacggtccagcggctgttgccggtgctgtgccaggcccacggcttgaccccctcatgctgttgatgaggagtatattgctaagtataatttggccataagtcgaatgaaagatcttgataagacagaccctttaaaccctctt

SEQ ID NO: 2207 - DNA, 430 bp, Artificial
  Mutation introduced by TALE nuclease pair POT33_T03 within a POT33 allele
caagtgtgtgcaatagtagttctactactacaactctcaaaactcctttcatttcatccaatacttctttaggttccactcctaagcccctctcaacttttcctccatggaaaacgtaacaaaactttcaaagtctcttgcaaagtttctaatagtggtgaccaaaagccaaaatcattgaaacgaattctgttgatcgaagaaatgttcttcttggcttaggaggtctttatggtgttgctaatgctataccattagcagcatcggctactcctataccatcccctgatctcaaaatcttgtggtagagccaccatatcggatggtccactagtaccctatacttgttgccccccatcctatgccaagctaacttttgacaccattccatattacaacccaatgctgttgatgaggagtatattgctaa

SEQ ID NO: 2208 - DNA, 519 bp, Artificial
  Mutation introduced by TALE nuclease pair POT33_T03 within a POT33 allele
  misc_feature (445): n is a or c or t or g
caagtgtgtgcaatagtagttctactactacaactctcaaaactcctttcatttcatccaatacttctttaggttccactcctaagcccctctcaacttttcctccatggaaaacgtaacaaaactttcaaagtctcttgcaaagtttctaatagtggtgaccaaaaccaaaacattgaaacgaattctgttgatcgaagaaatgttcttcttggcttaggaggtctttatggtgttgctaatgctataccattagcagcatcggctactcctataccatcccctgatctcaaaacttgtggtagagccaccatatcggatggtccactagtaccctatacttgttgcccccctcctatgccaactaactttgacaccattccatattacaagttcccttctatgactaaactccgtatccgtccctctgcttgttgagtgaggnatattatgctaagtataattttggccataagtcgaatgaaagatcttgataagacagaccctttaaaccctctt

SEQ ID NO: 2209 - DNA, 502 bp, Artificial
  Mutation introduced by TALE nuclease pair POT33_T03 within a POT33 allele
cagtgtgtgcaatagtagttctactactacaactctcaaaactcctttcatttcatccaatacttctttaggttccactcctaagccctctcaacttttcctccatggaaaacgtaacaaaactttcaaagtctcttgcaaagtttctaatagtggtgaccaaaaccaaaacattgaaacgaattctgttgatcgaagaaatgttcttcttggcttaggaggtctttatggtgttgctaatgctataccattagcagcatcggctactcctataccatcccctgatctcaaaacttgtggtagagccaccatatcggatggtccactagtaccctatacttgttgcccccctcctatgccaactaacttttgacaccattccatattacaagttcccttctatgactaaactccgtatccgtcctcatgctgttgatgaggagtatattgctaagtataatttggccataagtcgaatgaaagatcttgataagacagaccc

SEQ ID NO: 2210 - DNA, 504 bp, Artificial
  Mutation introduced by TALE nuclease pair POT33_T03 within a POT33 allele
caagtgtgtgcaatagtagttctactactacaactctcaaaactcctttcatttcatccaatacttctttaggttccactcctaagcccctctcaactttttcctccatggaaaacgtaacaaaactttcaaagtctcttgcaaagtttctaatagtggtgaccaaaaccaaaacattgaaacgaattctgttgatcgaagaaatgttcttcttggcttaggaggtctttatggtgttgctaatgctataccattagcagcatcggctactcctataccatcccctgatctcaaaacttgtggtagagccaccatatcggatggtccactagtaccctatacttgttgcccccctcctatgccaactaactttgacaccattccatattacaagttcccttctatgactaaactccgtatccgtcctcatgctgttgatgaggagtatattgctaagtataatttggccataagtcgaatgaaagatcttgataagacagaccc

SEQ ID NO: 2211 - DNA, 511 bp, Artificial
  Mutation introduced by TALE nuclease pair POT33_T03 within a POT33 allele
caagtgtgtgcaatagtagttctactactacaactctcaaaactcctttcatttcatccaatacttctttaggttccactcctaagcccctctcaacttttcctccatggaaaacgtaacaaaactttcaaagtctcttgcaaagtttctaatagtggtgaccaaaaccaaaacattgaaacgaattctgttgatcgaagaaatgttcttcttggcttaggaggtctttatggtgttgctaatgctataccattagcagcatcggctactcctataccatcccctgatctcaaaacttgtggtagagccaccatatcggatggtccactagtaccctatacttgttgcccccctcctatgccaactaactttgacaccattccatattacaagttcccttctatgactaaactccgtatccgtccccttgatgaggagtatatttgctaagtataatttggccataagtcgaatgaaagatcttgataagacagaccctttaaaccctctt

SEQ ID NO: 2212 - DNA, 508 bp, Artificial
  Mutation introduced by TALE nuclease pair POT33_T03 within a POT33 allele
  misc_feature (471); (490): n is a or c or t or g
caagtgtgtgcaatagtagttctactactacaactctcaaaactcctttcatttcatccaatacttctttaggttccactcctaagcccctctcaacttttcctccatggaaaacgtaacaaaactttcaaagtctcttgcaaagtttctaatagtggtgaccaaaaccaaaacattgaaacgaattctgttgatcgaagaaatgttcttcttggcttaggaggtctttatggtgttgctaatgctataccattagcagcatcggctactcctataccatcccctgatctcaaaacttgtggtagagccaccatatcggatggtccactagtaccctatacttgttgcccccctcctatgccaactaactttgacaccattccatattacaagttcccttctatgactaaactccgtatccgtgttgatgaggagtatatttgctaagtataatttggccataagtcgaangaaagatcttgataagacngaccctttaaaccctctt

SEQ ID NO: 2213 - DNA, 564 bp, Artificial
  Mutation introduced by TALE nuclease pair POT33_T03 within a POT33 allele
caagtgtgtgcaatagtagttctactactacaactctcaaaactcctttcatttcatccaatacttctttaggttccactcctaagccctctcaacttttcctccatggaaaacgtaacaaaactttcaaagtctcttgcaaagtttctaatagtggtgaccaaaaccaaaacattgaaacgaattctgttgatcgaagaaatgttcttcttggcttaggaggtctttatggtgttgctaatgctataccattagcagcatcggctactcctataccatcccctgatctcaaaacttgtggtagagccaccatatcggatggtccactagtaccctatacttgttgcccccctcctatgccaactaactttgacaccattccatattacaagttgcaatgcactgacgggtgccccgctcaacttgaccccggagcaggtggtggccatcgccccttctatgactaaactccctcatgctgttgatgaggagtatattgctaagtataatttggccataagtcgaatgaaagatcttgataagacagaccctttaaaccctctt

SEQ ID NO: 2214 - DNA, 497 bp, Artificial
  Mutation introduced by TALE nuclease pair POT33_T03 within a POT33 allele
caagtgtgtgcaatagtagttctactactacaactctcaaaactcctttcatttcatccaatacttctttaggttccactcctaagcccctctcaacttttcctccatggaaaacgtaacaaaactttcaaagtctcttgcaaagtttctaatagtggtgaccaaaaccaaaacattgaaacgaattctgttgatcgaagaaatgttcttcttggcttaggaggtctttatggtgttgctaatgctataccattagcagcatcggctactcctataccatcccctgatctcaaaacttgtggtagagccaccatatcggatggtccactagtaccctatacttgttgcccccctcctatgccaactaactttgacaccattccatattacaagttccccctgctcatcttgttgatgaggagtatattgccaagtacaatttggcaatttagtcgaatgaaagatcttgataagacagaccctttaaaccctcttgg

SEQ ID NO: 2215 - DNA, 466 bp, Artificial
  Mutation introduced by TALE nuclease pair POT33_T03 within a POT33 allele
  misc_feature (425): n is a or c or t or g
caagtgtgtgcaatagtagttctactactacaactctcaaaactcctttcatttcatccaatacttctttaggttccactcctaagccctctcaacttttcctccatggaaaacgtaacaaaactttcaaagtctcttgcaaagtttctaatagtggtgaccaaaaccaaaacattgaaacgaattctgttgatcgaagaaatgttcttcttggcttaggaggtctttatggtgttgctaatgctataccattagcagcatcggctactcctataccatcccctgatctcaaaacttgtggtagagccaccatatcggatggtccactagtaccctatacttgttgcccccctcctatgccaactaactttgacaccattccatattacaagtcatcttgttgatgaggagtatattgccaagtncaatttggcaattagtcgatgaagatcttgataagacagat

SEQ ID NO: 2216 - DNA, 485 bp, Artificial
  Mutation introduced by TALE nuclease pair POT33_T03 within a POT33 allele
caagtgtgtgcaatagtagttctactactacaactctcaaaactcctttcatttcatccaatacttctttaggttccactcctaagcccctctcaacttttcctccatggaaaacgtaacaaaactttcaaagtctcttgcaaagtttctaatagtggtgaccaaaaccaaaacattgaaacgaattctgttgatcgaagaaatgttcttcttggcttaggaggtctttatggtgttgctaatgctataccattagcagcatcggctactcctataccatcccctgatctcaaaacttgtggtagagccaccatatcggatggtccactagtaccctatacttgttgcccccctcctatgccaactaactttgacaccattccatattacaaccccatgctgttgatgaggagtatattgctaagtataatttggccataagtcgaatgaaagatcttgataagacagaccctttaaaccctctt

SEQ ID NO: 2217 - DNA, 471 bp, Artificial
  Mutation introduced by TALE nuclease pair POT33_T03 within a POT33 allele
caagtgtgtgcaatagtagttctactactacaactctcaaaactcctttcatttcatccaatacttctttaggttccactcctaagcccctctcaacttttcctccatggaaaacgtaacaaaactttcaaagtctcttgcaaagtttctaatagtggtgaccaaaaccaaaacattgaaacgaattctgttgatcgaagaaatgttcttcttggcttaggaggtctttatggtgttgctaatgctataccattagcagcatcggctactcctataccatcccctgatctcaaaacttgtggtagagccaccatatcggatggtccactagtaccctatacttgttgcccccctcctatgccaactaactttgacaccattccatattacaatcatgctgttgatgaggagtatattgctaagtataattttggccataagtcgaatgaaagatcttgataagacagaccc

SEQ ID NO: 2218 - DNA, 508 bp, Artificial
  Mutation introduced by TALE nuclease pair POT33_T03 within a POT33 allele
caagtgtgtgcaatagtagttctactactacaactctcaaaactcctttcatttcatccaatacttctttaggttccactcctaagcccctctcaacttttcctccatggaaaacgtaacaaaactttcaaagtctcttgcaaagtttctaatagtggtgaccaaaaccaaaacattgaaacgaattctgttgatcgaagaaatgttcttcttggcttaggaggtctttatggtgttgctaatgctataccattagcagcatcggctactcctataccatcccctgatctcaaaacttgtggtagagccaccatatcggatggtccactagtaccctatacttgttgcccccctcctatgccaactaactttgacaccattccatattacaagttcccttctatgactaaactccgtatccgtgttgatgaggagtatattgctaagtataattttggccataagtcgaatgaaagatcttgataagacagaccctttaaaccctctt

SEQ ID NO: 2219 - DNA, 479 bp, Artificial
  Mutation introduced by TALE nuclease pair POT33_T03 within a POT33 allele
caagtgtgtgcaatagtagttctactactacaactctcaaaactcctttcatttcatccaatacttctttaggttccactcctaagcccctctcaacttttcctccatggaaaacgtaacaaaactttcaaagtctcttgcaaagtttctaatagtggtgaccaaaaccaaaacattgaaacgaattctgttgatcgaagaaatgttcttcttggcttaggaggtctttatggtgttgctaatgctataccattagcagcatcggctactcctataccatcccctgatctcaaaacttgtggtagagccaccatatcggatggtccactagtaccctatacttgttgtccccctcctatgccaactaacttttgacaccattccatattacaagtgatgagggagtatattgctaagtataattttggcccataagtcgaatgaaagatcttgataagacagaccctttaaaccctctt

SEQ ID NO: 2220 - DNA, 511 bp, Artificial
  Mutation introduced by TALE nuclease pair POT33_T03 within a POT33 allele
caagtgtgtgcaatagtagttctactactacaactctcaaaactcctttcatttcatccaatacttctttaggttccactcctaagcccctctcaacttttcctccatggaaaacgtaacaaaactttcaaagtctcttgcaaagtttctaatagtggtgaccaaaaccaaaacattgaaacgaattctgttgatcgaagaaatgttcttcttggcttaggaggtctttatggtgttgctaatgctataccattagcagcatcggctactcctataccatcccctgatctcaaaacttgtggtagagcaaccatatcggatggtccactagtaccctatacttgttgcccccctcctatgccaactaactttgacaccattccatattacaagttcccttctatgactaaactccgtatccgtccccgttgatgaggagtatattgctaagtataatttggccataagtcgaatgaaagatcttgataagacagaccctttaaaccctctt

SEQ ID NO: 2221 - DNA, 577 bp, Artificial
  Mutation introduced by TALE nuclease pair POT33_T03 within a POT33 allele
caagtgtgtgcaatagtagttctactactacaactctcaaaactcctttcatttcatccaatacttctttaggttccactcctaagcccctctcaacttttcctccatggaaaacgtaacaaaactttcaaagtctcttgcaaagtttctaatagtggtgaccaaaaccaaaacactgaaacgaattctgttgatcgaagaaatgttcttcttggcttaggaggtctttatggtgttgctaatgctataccattagcagcatcggctactcctataccatcccctgatctcaaaacttgtggtagagccaccatatcggatggtccactagtaccctatacttgttgcccccctcctatgccaactaactttgacaccattccatattacaagttcccttctatgactaaactccgtatgtccggccacttcaagggcaactacaaggcccagctgaccaggctgaaccacatcaccaactgcaacggcgccgtgctgctcatgctgttgatgaggagtatattgctaagtataatttggccataagtcgaatgaaagatcttgataagacagaccc

SEQ ID NO: 2222 - DNA, 519 bp, Artificial
  Mutation introduced by TALE nuclease pair POT33_T03 within a POT33 allele
caagtgtgtgcaatagtagttctactactacaactctcaaaactcctttcatttcatccaatacttctttaggttccactcctaagccctctcaacttttcctccatggaaaacgtaacaaaactttcaaagtctcttgcaaagtttctaatagtggtgaccaaaaccaaaacattgaaacgaattctgttgatcgaagaaatgttcttcttggcttaggaggtctttatggtgttgctaatgctataccattagcagcatcggctactcctataccatcccctgatctcaaaacttgtggtagagccaccatatcggatggtccactagtaccctatacttgttgcccccctcctatgccaactaactttgacaccattccatattacaagttcccttctatgactaaactccgtatccgttccatgctgttgatgtggagtagtattgcttaatgatataattttggccataagtcgaatgaaagatcttgataagacagaccctttaaaccctctt

SEQ ID NO: 2223 - DNA, 510 bp, Artificial
  Mutation introduced by TALE nuclease pair POT33_T03 within a POT33 allele
caagtgtgtgcaatagtagttctactactacaactctcaaaactcctttcatttcatccaatacttctttaggttccactcctaagcccctctcaacttttcctccatggaaaacgtaacaaaactttcaaagtctcttgcaaagtttctaatagtggtgaccaaaaccaaaacattgaaacgaattctgttgatcgaagaaatgttcttcttggcttaggaggtctttatggtgttgctaatgctataccattagcagcatcggctactcctataccatcccctgatctcaaaacttgtggtagagccaccatatcggatggtccactagtaccctatacttgttgcccccctcctatgccaactaacttttgacaccattccatattacaagttcccttctatgactaaactccgtatccgttccatgctgttgtgtggagtagtagttatgcttaatgatataattttggccataagtcgaatgaaagatcttgataagacagaccc

SEQ ID NO: 2224 - DNA, 484 bp, Artificial
  Mutation introduced by TALE nuclease pair POT33_T03 within a POT33 allele
caagtgtgtgcaatagtagttctactactacaactctcaaaactcctttcatttcatccaatacttctttaggttccactcctaagcccctctcaacttttcctccatggaaaacgtaacaaaactttcaaagtctcttgcaaagtttctaatagtggtgaccaaaaccaaaacattgaaacgaattctgttgatcgaagaaatgttcttcttggcttaggaggtctttatggtgttgctaatgctataccattagcagcatcggctactcctataccatcccctgatctcaaaacttgtggtagagccaccatatcggatggtccactagtaccctatacttgttgcccccctcctatgccaactaactttgacaccattccatattacaagtcatcttgttgatgaggagtatattgccaagtacaatttggcaattagtcgaatgaaagatcttgataagacagaccctttaaaccctctt

SEQ ID NO: 2225 - DNA, 549 bp, Artificial
  Mutation introduced by TALE nuclease pair POT33_T03 within a POT33 allele
caagtgtgtgcaatagtagttctactactacaactctcaaaactcctttcatttcatccaatacttctttaggttccactcctaagccctctcaacttttcctccatggaaaacgtaacaaaactttcaaagtctcttgcaaagtttctaatagtggtgaccaaaaccaaaacattgaaacgaattctgttgatcgaagaaatgttcttcttggcttaggaggtctttatggtgttgctaatgctataccattagcagcatcggctactcctataccatcccctgatctcaaaacttgtggtagagccaccatatcggatggtccactagtaccctatacttgttgcccccctcctatgccaactaactttgacaccattccatattacaagttcccttctatgactaaacaggcgctggagacggtccagcggctgttgccggtgctgtgccaggcccacggcttgaccccccgcatgctgttgatgaggagtatattgctaagtactaatttggccataagtcgaatgaaagatcttgtaagacaga

SEQ ID NO: 2226 - DNA, 456 bp, Artificial
  Mutation introduced by TALE nuclease pair POT33_T03 within a POT33 allele
caagtgtgtgcaatagtagttctactactacaactctcaaaactcctttcatttcatccaatacttctttaggttccactcctaagcccctctcaacttttcctccatggaaaacgtaacaaaactttcaaagtctcttgcaaagtttctaatagtggtgaccaaaaccaaaacattgaaacgaattctgttgatcgaagaaatgttcttcttggcttaggaggtctttatggtgttgctaatgctataccattagcagcatcggctactcctataccatcccctgatctcaaaacttgtggtagagccaccatatcggatggtccactagtaccctatacttgttgcccccctcctatgccaactaactttgacaccattccatattacaactcatgctgttgatgaggagtatattgctaagtataatttgggccataagtcgaatgaaagatc

SEQ ID NO: 2227 - DNA, 504 bp, Artificial
  Mutation introduced by TALE nuclease pair POT33_T03 within a POT33 allele
caagtgtgtgcaatagtagttctactactacaactctcaaaactcctttcatttcatccaatacttctttaggttccactcctaagcccctctcaactttttcctccatggaaaacgtaacaaaactttcaaagtctcttgcaaagtttctaatagtggtgaccaaaaccaaaacattgaaacgaattctgttgatcgaagaaatgttcttcttggcttaggaggtctttatggtgttgctaatgctataccattagcagcatcggctactcctataccatcccctgatctcaaaacttgtggtagagccaccatatcggatggtccactagtaccctatacttgttgcccccctcctatgccaactaacttttgacaccattccattattacaagttcccttctatgactaaactccgtatccgtccatctgttgatgaggagtatatttgctaagtataatttggccataagtcgaatgaaagatcttgataagacagaccc

SEQ ID NO: 2228 - DNA, 514 bp, Artificial
  Mutation introduced by TALE nuclease pair POT33_T03 within a POT33 allele
caagtgtgtgcaatagtagttctactactacaactctcaaaactcctttcatttcatccaatacttcttttaggttccactcctaagccccctctcaacttttcctccatggaaaacgtaacaaaactttcaaagtctcttgcaaagtttctaatagtggtgaccaaaaccaaaacattgaaacgaattctgttgatcgaagaaatgttcttcttggcttaggaggtctttatggtgttgctaatgctataccattagcagcatcggctactcctataccatcccctgatctcaaaacttgtggtagagccaccatatcggatggtccactagtaccctatacttgttgcccccctcctatgccaactaactttgacaccattccatattacaagttttctatgactaaactccgtatcatgctgttgatgaggagtattttattgcctaagtataatttgggccataagtcgaatgaaagatcttgataagacagacccttttaaaccctctt

SEQ ID NO: 2229 - DNA, 518 bp, Artificial
  Mutation introduced by TALE nuclease pair POT33_T03 within a POT33 allele
  misc_feature (325): n is a or c or t or g
caagtgtgtgcaatagtagttctactactacaactctcaaaactcctttcatttcatccaatacttctttaggttccactcctaagcccctctcaacttttcctccatggaaaacgtaacaaaactttcaaagtctcttgcaaagtttctaatagtggtgaccaaaaccaaaacattgaaacgaattctgttgatcgaagaaatgttcttcttggcttaggaggtctttatggtgttgctaatgctataccattagcagcatcggctactcctataccatcccctgatctcaaaacttgtggtagagccaccatatcggatggcnccactagtaccctatacttgttgcccccctcctatgccaactaactttgacaccattccatattacaaagttcccttctatgactaaactccgtatccgtcctcatgctgttgatgaggagtatattgctaagtataatttggccataagtcgaatgaaagatcttgataagacagaccctttaaaccctctt

SEQ ID NO: 2230 - DNA, 515 bp, Artificial
  Mutation introduced by TALE nuclease pair POT33_T03 within a POT33 allele
caagtgtgtgcaatagtagttctactactacaactctcaaaactcctttcatttcatccaatacttctttaggttccactcctaagcccctctcaacttttcctccatggaaaacgtaacaaaactttcaaagtctcttgcaaagtttctaatagtggtgaccaaaaccaaaacattgaaacgaattctgttgatcgaagaaatgttcttcttggcttaggaggtctttatggtgttgctaatgctataccattagcagcatcggctactcctataccatcccctgatctcaaaacttgtggtagagccaccatatcggatggtccactagtaccctatacttgttgcccccctcctatgccaactaactttgacaccattccatattacaagttcccttctatgactaaactccgtatccgtctcatgctgttgatgaggagtatattgctaagtataatttggccataagtcgaatgaaagatcttgataagacagaccctttaaaccctctt

SEQ ID NO: 2231 - DNA, 515 bp, Artificial
  Mutation introduced by TALE nuclease pair POT33_T03 within a POT33 allele
caagtgtgtgcaatagtagttctactactacaactctcaaaactcctttcatttcatccaatacttctttaggttccactcctaagcccctctcaacttttcctccatggaaaacgtaacaaaactttcaaagtctcttgcaaagtttctaatagtggtgaccaaaaccaaaacattgaaacgaattctgttgatcgaagaaatgttcttcttggcttaggaggtctttatggtgttgctaatgctataccattagcagcatcggctactcctataccatcccctgatctcaaaacttgtggtagagccaccatatcggatggtccactagtaccctatacttgttgcccccctcctatgccaactaactttgacaccattccatattacaagttcccttctatgactaaactccgtatccgtcccatctgttgatgaggagtatattgctaagtataatttggccataagtcgaatgaaagatcttgataagacagacccttttaaaccctctt

SEQ ID NO: 2232 - DNA, 593 bp, Artificial
  Mutation introduced by TALE nuclease pair POT33_T03 within a POT33 allele
caagtgtgtgcaatagtagttctactactacaactctcaaaactcctttcatttcatccaatacttctttaggttccactcctaagcccctctcaacttttcctccatggaaaacgtaacaaaactttcaaagtctcttgcaaagtttctaatagtggtgaccaaaaccaaaacattgaaacgaattctgttgatcgaagaaatgttcttcttggcttaggaggtctttatggtgttgctaatgctataccattagcagcatcggctactcctataccatcccctgatctcaaaacttgtggtagagccaccatatcggatggtccactagtaccctatacttgttgcccccctcctatgccaactaactttgtacaccattccatattcacaagttttacggtcttgagccccctaccgcaggtggtggccgatcgccagcaatggcggtggcaagcaggcgctggagacggtccagcggctgttgccggtgctgtgccaggctcatgctgttgatgaggagtatattgctaagtataatttggccataagtcgaatgaaagatcttgataagacagaccctttaaaccctc

SEQ ID NO: 2233 - DNA, 577 bp, Artificial
  Mutation introduced by TALE nuclease pair POT33_T03 within a POT33 allele
caagtgtgtgcaatagtagttctactactacaactctcaaaactcctttcatttcatccaatacttctttagattccactcctaagcccctctcaacttttcctccatggaaaacgtaacaaaactttcaaagtctcttgcaaagtttctaatagtggtgaccaaaaccaaaacattgaaacgaattctgttgatcgaagaaatgttcttcttggcttaggaggtctttatggtgttgctaatgctataccattagcagcatcggctactcctataccatcccctgatctcaaaacttgtggtagagccaccatatcggatggtccactagtaccctatacttgttgcccccctcctatgccaactaactttgacaccattccatattacaagttcccttctatgactaaactccgtatccgtcccctgagataggtgcctcactgattaagcattggtaactgtcagaccaagtttactcatagctcatgctgttgatgaggagtatattgctaagtataatttggccataagtcgaatgaaagatcttgataagacagaccctttaaaccctctt

SEQ ID NO: 2234 - DNA, 461 bp, Artificial
  Mutation introduced by TALE nuclease pair POT33_T03 within a POT33 allele
caagtgtgtgcaatagtagttctactactacaactctcaaaactcctttcatttcatccaatacttctttaggttccactcctaagcccctctcaacttttcctccatggaaaacgtaacaaaactttcaaagtctcttgcaaagtttctaatagtggtgaccaaaaccaaaacattgaaacgaattctgttgatcgaagaaatgttcttcttggcttaggaggtctttatggtgttgctaatgctataccattagcagcatcggctactcctataccatcccctgatctcaaaacttgtggtagagccaccatatcggatggtccactagtaccctatacttgttgcccccctcctatgccaactaactttgacaccattccatattacaagttcccttctatgactaaactccgtatccgtcccctgggatcagcctttttatagcaacctggcgccat

SEQ ID NO: 2235 - DNA, 533 bp, Artificial
  Mutation introduced by TALE nuclease pair POT33_T03 within a POT33 allele
caagtgtgtgcaatagtagttctactactacaactctcaaaactcctttcatttcatccaatacttctttaggttccactcctaagcccctctcaacttttcctccatggaaaacgtaacaaaactttcaaagtctcttgcaaagtttctaatagtggtgaccaaaaccaaaacattgaaacgaattctgttgatcgaagaaatgttcttcttggcttaggaggtctttatggtgttgctaatgctataccattagcagcatcggctactcctataccatcccctgatctcaaaacttgtggtagagccaccatatcggatggtccactagtaccctatacttgttgcccccctcctcatgccaactaactttagtacaccacttccattattcacaagttccaaccggtccagcggctgttgccggtgctgtgccaggcccacggctttgacccccagcaggtggtgggccatgcgccagctcatgctgttgatgaggagtatattgctaagtataatttggccataagtcg

SEQ ID NO: 2236 - DNA, 628 bp, Artificial
  Mutation introduced by TALE nuclease pair POT33_T03 within a POT33 allele
caagtgtgtgcaatagtagttctactactacaactctcaaaactcctttcatttcatccaatacttctttaggttccactcctaagcccctctcaacttttcctccatggaaaacgtaacaaaactttcaaagtctcttgcaaagtttctaatagtggtgaccaaaaccaaaacattgaaacgaattctgttgatcgaagaaatgttcttcttggcttaggaggtctttatggtgttgctaatgctataccattagcagcatcggctactcctataccatcccctgatctcaaaacttgtggtagagccaccatatcggatggtccactagtaccctatacttgttgcccccctcctatgccaactaactttgacaccattccatattacaagcttcccttctatgactaaactccgtatccgtccgtcgggcttcctggagccgcccaggtgcttgccctgtagccgtacaccttcatgaagaactcggatcaagagctaccaactctttttccgaaggtaactggcttcagcagagcgctgctcatgctgttgatgaggagtatattgctaagtataatttggccataagtcgaatgaaagatcttgataagacagaccctttaaa

SEQ ID NO: 2237 - DNA, 569 bp, Artificial
  Mutation introduced by TALE nuclease pair POT33_T03 within a POT33 allele
caagtgtgtgcaatagtagttctactactacaactctcaaaactcctttcatttcatccaatacttctttaggttccactcctaagcccctctcaacttttcctccatggaaaacgtaacaaaactttcaaagtctcttgcaaagtttctaatagtggtgaccaaaaccaaaacattgaaacgaattctgttgatcgaagaaatgttcttcttggcttaggaggtctttatggtgttgctaatgctataccattagcagcatcggctactcctataccatcccctgatctcaaaacttgtggtagagccaccatatcggatggtccactagtaccctatacttgttgcccccctcctatgccaactaactttgacaccattccatattacaagttcccttctatgactaaactccgtatccgtcccctgttccgaccctgccgcttaccggatacctgtccgcctttctcccttcggctcatgctgttgatgaggagtatattgctaagtataatttggccataagtcgaatgaaagatcttgataagacagaccctttaaaccctctt

SEQ ID NO: 2238 - DNA, 590 bp, Artificial; identical to SEQ ID NO: 1997
  Mutation introduced by TALE nuclease pair POT33_T03 within a POT33 allele

SEQ ID NO: 2239 - DNA, 515 bp, Artificial
  Mutation introduced by TALE nuclease pair POT33_T03 within a POT33 allele
caagtgtgtgcaatagtagttctactactacaactctcaaaactcctttcatttcatccaatacttctttaggttccactcctaagcccctctcaacttttcctccatggaaaacgtaacaaaactttcaaagtctcttgcaaagtttctaatagtggtgaccaaaaccaaaacattgaaacgaattctgttgatcgaagaaatgttcttcttggcttaggaggtctttatggtgttgctaatgctataccattagcagcatcggctactcctataccatcccctgatctcaaaacttgtggtagagccaccatatcggatggtccactagtaccctatacttgttgcccccctcctatgccaactaactttgacaccattccatattacaagttcccttctatgactaaactccgtatccgtcccctcggcgggcgtcctgcgctggatgcagtgaaaaggggattggggggatcctatctcatgctgttgatgaggagtatattgctaagtat

SEQ ID NO: 2240 - DNA, 591 bp, Artificial; identical to SEQ ID NO: 2027
  Mutation introduced by TALE nuclease pair POT33_T03 within a POT33 allele

SEQ ID NO: 2241 - DNA, 540 bp, Artificial
  Mutation introduced by TALE nuclease pair POT33_T03 within a POT33 allele
caagtgtgtgcaatagtagttctactactacaactctcaaaactcctttcatttcatccaatacttctttaggttccactcctaagcccctctcaacttttcctccatggaaaacgtaacaaaactttcaaagtctcttgcaaagtttctaatagtggtgaccaaaaccaaaacattgaaacgaattctgttgatcgaagaaatgttcttcttggcttaggaggtctttatggtgttgctaatgctataccattagcagcatcggctactcctataccatcccctgatctcaaaacttgtggtagagccaccatatcggatggtccactagtaccctatacttgttgcccccctcctatgccaactaactttgacaccattccatattacaagttcccttctatgactaaactccgtatccgttgctggcgatggccaccacctgctgggggctcatgctgttgatgaggagtatattgctaagtataatttggccataagtcgaatgaaagatcttgataagacagaccctttaaaccc

SEQ ID NO: 2242 - DNA, 586 bp, Artificial; identical to SEQ ID NO: 2030
  Mutation introduced by TALE nuclease pair POT33_T03 within a POT33 allele

SEQ ID NO: 2243 - DNA, 582 bp, Artificial; identical to SEQ ID NO: 2035
  Mutation introduced by TALE nuclease pair POT33_T03 within a POT33 allele

SEQ ID NO: 2244 - DNA, 520 bp, Artificial; identical to SEQ ID NO: 2042
  Mutation introduced by TALE nuclease pair POT33_T03 within a POT33 allele

SEQ ID NO: 2245 - DNA, 588 bp, Artificial; identical to SEQ ID NO: 2047
  Mutation introduced by TALE nuclease pair POT33_T03 within a POT33 allele

SEQ ID NO: 2246 - DNA, 578 bp, Artificial
  Mutation introduced by TALE nuclease pair POT33_T03 within a POT33 allele
caagtgtgtgcaatagtagttctactactacaactctcaaaactcctttcatttcatccaatacttctttaggttccactcctaagcccctctcaacttttcctccatggaaaacgtaacaaaactttcaaagtctcttgcaaagtttctaatagtggtgaccaaaaccaaaacattgaaacgaattctgttgatcgaagaaatgttcttcttggcttaggaggtctttatggtgttgctaatgctataccattagcagcatcggctactcctataccatcccctgatctcaaaacttgtggtagagccaccatatcggatggtccactagtaccctatacttgttgcccccctcctatgccaactaactttgacaccattccatattacaagttcaagcaggcgctggagacggtgaaggaagcggctgttgccggtgctgtgccaggcccacggcttgacccggagcaggtggtggccatcgccagcatgctgttgatgaggagtatattgctaagtataatttggccataagtcgaatgaaagatcttgataagacagaccctttaaaccctctt

SEQ ID NO: 2247 - DNA, 603 bp, Artificial
  Mutation introduced by TALE nuclease pair POT33_T03 within a POT33 allele
caagtgtgtgcaattagttctactactacaactctcaaaactcctttcatttcatccaatacttctttaggttccactcctaagcccctctcaacttttcctccatggaaaacgtaacaaaacttttaaagtctcttgcaaagtttctaatagtggtgaccaaaaccaaaacattgaaacgaattctgttgatcgaagaaatgttcttcttggcttaggaggtctttatggtgttgctaatgctataccattagcagcatcggctactcctataccatcccctgatctcaaaacttgtggtagagccaccatatcggatggtccactagtaccctatacttgttgcccccctcctatgccaactaactttgacaccattccatattacaagttcccttctatgactaaactccgtatccgtcccctccggctggctggtttattgctgataaatctggagccggtgagcgtggggtctcgcggtatcattgcagcactggggggccagatggtaagccctcatgctgttgatgaggagtatattgctaagtataatttggccataagtcgaatgaaagatcttgataagacagaccctttaaa

SEQ ID NO: 2248 - DNA, 569 bp, Artificial
  Mutation introduced by TALE nuclease pair POT33_T03 within a POT33 allele
caagtgtgtgcaatagtagttctactactacaactctcaaaactcctttcatttcatccaatacttctttaggttccactcctaagcccctctcaacttttcctccatggaaaacgtaacaaaactttcaaagtctcttgcaaagtttctaatagtggtgaccaaaaccaaaacattgaaacgaattctgttgatcgaagaaatgttcttcttggcttaggaggtctttatggtgttgctaatgctataccattagcagcatcggctactcctataccatcccctgatctcaaaacttgtggtagagccaccatatcggatggtccactagtaccctatacttgttgcccccctcctatgccaactaactttgacaccattccatattacaagttcccttctatgactaaactccgtatccgtcccctgcccggcttcgtaattcataaacggcttgtcccgcgtcatcggcggggctcatgctgttgatgaggagtatattgctaagtataattttggccataagtcgaatgaaagatcttgataagacagaccctttaaaccctctt

SEQ ID NO: 2249 - DNA, 518 bp, Artificial
  Mutation introduced by TALE nuclease pair POT33_T03 within a POT33 allele
caagtgtgtgcaatagtagttctactactacaactctcaaaactcctttcatttcatccaatacttctttaggttccactcctaagcccctctcaacttttcctccatggaaaacgtaacaaaactttcaaagtctcttgcaaagtttctaatagtggtgaccaaaaccaaaacattgaaacgaattctgttgatcgaagaaatgttcttcttggcttaggaggtctttatggtgttgctaatgctataccattagcagcatcggctactcctataccatcccctgatctcaaaacttgtggtagagccaccatatcggatggtccactagtaccctatacttgttgcccccctcctatgccaactaactttgacaccattccatattacaagttcccttctatgactaaactccgtatccgtccccggtgctgtgccaggtcccacggcttgaccccggagcaggttggtggccgcttcatgctgttgatgaggagtatattgctaagtataacttt

SEQ ID NO: 2250 - DNA, 576 bp, Artificial
  Mutation introduced by TALE nuclease pair POT33_T03 within a POT33 allele
caagtgtgtgcaatagtagttctactactacaactctcaaaactcctttcatttcatccaatacttctttagattccactcctaagccctctcaacttttcctccatggaaaacgtaacaaaactttcaaagtctcttgcaaagtttctaatagtggtgaccaaaaccaaaacattgaaacgaattctgttgatcgaagaaatgttcttcttggcttaggaggtctttatggtgttgctaatgctataccattagcagcatcggctactcctataccatcccctgatctcaaaacttgtggtagagccaccatatcggatggtccactagtaccctatacttgttgcccccctcctatgccaactaactttgacaccattccatattacaagttcccttctatgactaaactccgtatccgtcccctgagataggtgcctcactgattaagcattggtaactgtcagaccaagtttactcatagctcatgctgttgatgaggagtatattgctaagtataatttggccataagtcgaatgaaagatcttgataagacagaccctttaaaccctctt

SEQ ID NO: 2251 - DNA, 531 bp, Artificial; identical to SEQ ID NO: 2083
  Mutation introduced by TALE nuclease pair POT33_T03 within a POT33 allele

SEQ ID NO: 2252 - DNA, 577 bp, Artificial
  Mutation introduced by TALE nuclease pair POT33_T03 within a POT33 allele
  misc_feature (426); (497); (520): n is a or c or t or g
caagtgtgtgcaatagtagttctactactacaactctcaaaactcctttcatttcatccaatacttctttaggttccactcctaagcccctctcaacttttcctccatggaaaacgtaacaaaactttcaaagtctcttgcaaagtttctaatagtggtgaccaaaaccaaaacattgaaacgaattctgttgatcgaagaaatgttcttcttggcttaggaggtctttatggtgttgctaatgctataccattagcagcatcggctactcctataccatcccctgatctcaaaacttgtgtagagccaccatatcggatggtccactagtaccctatacttgttgcccccctcctatgccaactaactttgacaccattccatattacaagttcccttctatgactaaactccgtatccgtgggngattaagttggggtaacgccaggggtttttcccagtcacgacgttgtaaaacgacgggccagtgaattcgngctcggtacctcgcgaatgcatnatgctgttgatgaggagtatattgctaagtataattttggccataagtcgaatgaaa

SEQ ID NO: 2253 - DNA, 558 bp, Artificial
  Mutation introduced by TALE nuclease pair POT33_T03 within a POT33 allele
caagtgtgtgcaatagtagttctactactacaactctcaaaactcctttcatttcatccaatacttctttaggttccactcctaagcccctctcaacttttcctccatggaaaacgtaacaaaactttcaaagtctcttgcaaagtttctaatagtggtgaccaaaaccaaaacattgaaacgaattctgttgatcgaagaaatgttcttcttggcttaggaggtctttatggtgttgctaatgctataccattagcagcatcggctactcctataccatcccctgatctcaaaacttgtggtagagccaccatatcggatggtccactagtaccctatacttgttgcccccctcctatgccaactaactttgacaccattccatattacaagttcccttctatgactaaactccgtatccgtcccagatgcattcgcgaggtaccgagctcgaattcactggccgtcgttttacaacgtcgtgactgggaaaccctgctcatgctgttgatgaggagtatattgctaagtataattttggccataagtcgaatgaaa

SEQ ID NO: 2254 - DNA, 549 bp, Artificial
  Mutation introduced by TALE nuclease pair POT33_T03 within a POT33 allele
caagtgtgtgcaatagtagttctactactacaactctcaaaactcctttcatttcatccaatacttctttaggttccactcctaagcccctctcaacttttcctccatggaaaacgtaacaaaactttcaaagtctcttgcaaagtttctaatagtggtgaccaaaaccaaaacattgaaacgaattctgttgatcgaagaaatgttcttcttggcttaggaggtctttatggtgttgctaatgctataccattagcagcatcggctactcctataccatcccctgatctcaaaacttgtggtagagccaccatatcggatggtccactagtaccctatacttgttgcccccctcctatgccaactaactttgacaccattccatattacaagttcccttctatgactaaactccgtatccgtcccctcggcgggcgtcctgcgctggatgcagtgaaaaggggattggggggcatcctatctcatgctgttgatgaggagtatattgcctaagtataattttggccataagtcgaatgaaagatcttg

SEQ ID NO: 2255 - DNA, 582 bp, Artificial; identical to SEQ ID NO: 2097
  Mutation introduced by TALE nuclease pair POT33_T03 within a POT33 allele

SEQ ID NO: 2256 - DNA, 556 bp, Artificial
  Mutation introduced by TALE nuclease pair POT33_T03 within a POT33 allele
caagtgtgtgcaatagtagttctactactacaactctcaaaactcctttcatttcatccaatacttctttaggttccactcctaagcccctctcaacttttcctccatggaaaacgtaacaaaactttcaaagtctcttgcaaagtttctaatagtggtgaccaaaaccaaaacattgaaacgaattctgttgatcgaagaaatgttcttcttggcttaggaggtctttatggtgttgctaatgctataccattagcagcatcggctactcctataccatcccctgatctcaaaacttgtggtagagccaccatatcggatggtccactagtaccctatacttgttgcccccctcctatgccaactaactttgacaccattccatattacaagttcccttctatgactaaactccgtatccgtcccctcggcgggcgtcctgcgctggatgcagtgaaaaggggattggggggatcctatctcatgctgttgatgaggagtatattgctaagtataatttggccataagtcgaatgaaagatcttgataagacaga

SEQ ID NO: 2257 - DNA, 581 bp, Artificial
  Mutation introduced by TALE nuclease pair POT33_T03 within a POT33 allele
caagtgtgtgcaatagtagttctactactacaactctcaaaactcctttcatttcatccaatacttctttaggttccactcctaagcccctctcaacttttcctccatggaaaacgtaacaaaactttcaaagtctcttgcaaagtttctaatagtggtgaccaaaaccaaaacattgaaacgaattctgttgatcgaagaaatgttcttcttggcttaggaggtctttatggtgttgctaatgctataccattagcagcatcggctactcctataccatcccctgatctcaaaacttgtggtagagccaccatatcggatggtccactagtaccctatacttgttgcccccctcctatgccaactaactttgacaccattccatattacaagttcccttctatgactaaactccgtatccggctggcgatggccaccacctgctccggggtcaagccgtggggcctggcacagcaccggcaacagccgctcatgctgttgatgaggagtatattgctaagtataatttggccataagtcgaatgaaagatcttgataagacagaccctttaaaccctctt

SEQ ID NO: 2258 - DNA, 641 bp, Artificial
  Mutation introduced by TALE nuclease pair POT33_T03 within a POT33 allele
caagtgtgtgcaatagtagttctactactacaactctcaaaactcctttcatttcatccaatacttctttaggttccactcctaagcccctctcaacttttcctccatggaaaacgtaacaaaactttcaaagtctcttgcaaagtttctaatagtggtgaccaaaaccaaaacattgaaacgaattctgttgatcgaagaaatgttcttcttggcttaggaggtctttatggtgttgctaatgctataccattagcagcatcggctactcctataccatcccctgatctcaaaacttgtggtagagccaccatatcggatggtccactagtaccctatacttgttgcccccctcctatgccaactaactttgacaccattcccatattacaagttcccttctatgactaaactccgtatccgttacgttttggaactgacagaaccgcaacgttgaaggagccactcagccgcggggtttctggagtttaatgagctaagcaccatgccatccgtaagatgcttttctgtgactggtgagtactcaaccaagtcactcatgctgttgatgaggagtatattgctaagtataatttggccataagtcgaatgaaagatcttgataagacagaccctttaaa

SEQ ID NO: 2259 - DNA, 572 bp, Artificial
  Mutation introduced by TALE nuclease pair POT33_T03 within a POT33 allele
caagtgtgtgcaatagtagttctactactacaactctcaaaactcctttcatttcatccaatacttctttaggttccactcctaagcccctctcaacttttcctccatggaaaacgtaacaaaactttcaaagtctcttgcaaagtttctaatagtggtgaccaaaaccaaaacattgaaacgaattctgttgatcgaagaaatgttcttcttggcttaggaggtctttatggtgttgctaatgctataccattagcagcatcggctactcctataccatcccctgatctcaaaacttgtggtagagccaccatatcggatggtccactagtaccctatacttgttgcccccctcctatgccaactaactttgacaccattccatattacaagttcccttctatgactaaactccgtatccgtcctcggggcgaaactctcaaggatcttaccgctgttgagatccagttcgatgtaacccacatgctgttgatgaggagtatattgctaagtataatttggccataagtcgaatgaaagatcttgataagacagaccctttaaaccctctt

SEQ ID NO: 2260 - DNA, 541 bp, Artificial
  Mutation introduced by TALE nuclease pair POT33_T03 within a POT33 allele
caagtgtgtgcaatagtagttctactactacaactctcaaaactcctttcatttcatccaatacttctttaggttccactcctaagcccctctcaacttttcctccatggaaaacgtaacaaaactttcaaagtctcttgcaaagtttctaatagtggtgaccaaaaccaaaacattgaaacgaattctgttgatcgaagaaatgttcttcttggcttaggaggtctttatggtgttgctaatgctataccattagcagcatcggctactcctataccatcccctgatctcaaaacttgtggtagagccaccatatcggatggtccactagtaccctatacttgttgcccccctcctatgccaactaactttgacaccattccatattacaagttcccttctatgactaaactccgtatccgttgctggcgatggccaccacctgctggggggctcatgctgttgatgaggagtatattgctaagtataatttggccataagtcgaatgaaagatcttgataagacagaccctttaaaccc

SEQ ID NO: 2261 - DNA, 450 bp, Artificial; identical to SEQ ID NO: 2106
  Mutation introduced by TALE nuclease pair POT33_T03 within a POT33 allele

SEQ ID NO: 2262 - DNA, 552 bp, Artificial
  Mutation introduced by TALE nuclease pair POT33_T03 within a POT33 allele
  misc_feature (465): n is a or c or t or g
caagtgtgtgcaatagtagttctactactacaactctcaaaactcctttcatttcatccaatacttctttaggttccactcctaagcccctctcaacttttcctccatggaaaacgtaacaaaactttcaaagtctcttgcaaagtttctaatagtggtgaccaaaaccaaaacattgaaacgaattctgttgatcgaagaaatgttcttcttggcttaggaggtctttatggtgttgctaatgctataccattagcagcatcggctactcctataccatcccctgatctcaaaacttgtggtagagccaccatatcggatggtccactagtaccctatacttgttgcccccctcctatgccaactaactttgacaccattccatattacaagttcccttctatgactaaactccgtatccgtccacggtccagcgcctgcttgccgccatcgtggctggccgcncatgctgttgatgaggagtatattgctaagtataatttggccataagtcgaatgaaagatcttgataagacagaccctttaaaccct

SEQ ID NO: 2263 - DNA, 579 bp, Artificial; identical to SEQ ID NO: 2108
  Mutation introduced by TALE nuclease pair POT33_T03 within a POT33 allele

SEQ ID NO: 2264 - DNA, 555 bp, Artificial
  Mutation introduced by TALE nuclease pair POT33_T03 within a POT33 allele
caagtgtgtgcaatagtagttctactactacaactctcaaaactcctttcatttcatccaatacttctttaggttccactcctaagcccctctcaacttttcctccatggaaaacgtaacaaaactttcaaagtctcttgcaaagtttctaatagtggtgaccaaaaccaaaacattgaaacgaattctgttgatcgaagaaatgttcttcttggcttaggaggtctttatggtgttgctaatgctataccattagcagcatcggctactcctataccatcccctgatctcaaaacttgtggtagagccaccatatcggatggtccactagtaccctatacttgttgcccccctcctatgccaactaactttgacaccattccatattacaagttcccttctatgactaaactccgtatccgtccgcttgccaccgccattgctggcgatggccaccacctgcatgctgttgatgaggagtatattgctaagtataattttggccataagtcgaatgaaagatcttgataagacagaccctttaaaccctcttgg

SEQ ID NO: 2265 - DNA, 477 bp, Artificial; identical to SEQ ID NO: 2121
  Mutation introduced by TALE nuclease pair POT33_T03 within a POT33 allele

SEQ ID NO: 2266 - DNA, 602 bp, Artificial
  Mutation introduced by TALE nuclease pair POT33_T03 within a POT33 allele
caagtgtgtgcaatagtagttctactactacaactctcaaaactcctttcatttcatccaatacttctttaggttccactcctaagccctctcaacttttcctccatggaaaacgtaacaaaactttcaaagtctcttgcaaagtttctaatagtggtgaccaaaaccaaaacattgaaacgaattctgttgatcgaagaaatgttcttcttggcttaggaggtctttatggtgttgctaatgctataccattagcagcatcggctactcctataccatcccctgatctcaaaacttgtggtagagccaccatatcggatggtccactagtaccctatacttgttgcccccctcctatgccaactaactttgacaccattccatattacaagttcccttctatgactaaactccgtatccgtggcgattaagttgggtaacgccagggtttttcccagtcacgacgttgtaaaacgacggccagtgaattcgagctcggtacctcgcgaatgcatcatgctgttgatgaggagtatattgctaagtataattttggccataagtcgaatgaaagatcttgataagacagaccctttaaaccc

SEQ ID NO: 2267 - DNA, 577 bp, Artificial
  Mutation introduced by TALE nuclease pair POT33_T03 within a POT33 allele
caagtgtgtgcaatagtagttctactactacaactctcaaaactcctttcatttcatccaatacttctttaggttccactcctaagcccctctcaacttttcctccatggaaaacgtaacaaaactttcaaagtctcttgcaaagtttctaatagtggtgaccaaaaccaaaacattgaaacgaattctgttgatcgaagaaatgttcttcttggcttaggaggtctttatggtgttgctaatgctataccattagcagcatcggctactcctataccatcccctgatctcaaaacttgtggtagagccaccatatcggatggtccactagtaccctatacttgttgcccccctcctatgccaactaactttgacaccattccatattacaagttcccttctatgactaaactccgtatccgtcctgttgccgtgctgtgccaggcccacggcttgacccggcagcaggtggtggccatcgccagctcatgctgttgatgaggagtatattgctaagtataatttggccataagtcgaatgaaagatcttgataagacagaccctttaaaccctctt

SEQ ID NO: 2268 - DNA, 614 bp, Artificial
  Mutation introduced by TALE nuclease pair POT33_T03 within a POT33 allele
caagtgtgtgcaatagtagttctactactacaactctcaaaactcctttcatttcatccaatacttctttaggttccactcctaagcccctctcaacttttcctccatggaaaacgtaacaaaactttcaaagtctcttgcaaagtttctaatagtggtgaccaaaaccaaaacattgaaacgaattctgttgatcgaagaaatgttcttcttggcttaggaggtctttatggtgttgctaatgctataccattagcagcatcggctactcctataccatcccctgatctcaaaacttgtggtagagccaccatatcggatggtccactagtaccctatacttgttgcccccctcctatgccaactaactttgacaccattccatattacaagttcccttctatgactaaactccgtatccgtcccctgctatgaccatgattacgaattcccgatctagtaacatagatgacaccgcgcgcgataatttatcctagtttgcgcgctatattttgttttctatcgcgtactcatgctgttgatgaggagtatattgctaagtataatttggccataagtcgaatgaaagatcttgataagacagaccctttaaa

SEQ ID NO: 2269 - DNA, 581 bp, Artificial
  Mutation introduced by TALE nuclease pair POT33_T03 within a POT33 allele
caagtgtgtgcaatagtaattctactactacaactctcaaaactcctttcatttcatccaatacttctttaggttccactcctaagcccctctcaacttttcctccatggaaaacgtaacaaaactttcaaagtctcttgcaaagtttctaatagtggtgaccaaaaccaaaacattgaaacgaattctgttgatcgaagaaatgttcttcttggcttaggaggtctttatggtgttgctaatgctataccattagcagcatcggctactcctataccatcccctgatctcaaaacttgtggtagagccaccatatcggatggtccactagtaccctatacttgttgcccccctcctatgccaactaactttgacaccattccatattacaagttttacggcttgacccccacgcaggtggtggcccatcgccagcaatggcggtggcaagcaggcgctggagacggtccagcggctgttgccggtgctgtgccaggctcatgctgttgattgaggagtatattgctaagtataatttggccatgaagtcgaatgaaagatcttgataagacagacccttt

SEQ ID NO: 2270 - DNA, 529 bp, Artificial
  Mutation introduced by TALE nuclease pair POT33_T03 within a POT33 allele
caagtgtgtgcaatagtagttctactactacaactctcaaaactcctttcatttcatccaatacttctttaggttccactcctaagcccctctcaacttttcctccatggaaaacgtaacaaaactttcaaagtctcttgcaaagtttctaatagtggtgaccaaaaccaaaacattgaaacgaattctgttgatcgaagaaatgttcttcttggcttaggaggtctttatggtgttgctaatgctataccattagcagcatcggctactcctataccatcccctgatctcaaaacttgtggtagagccaccatatcggatggtccactagtaccctatacttgttgcccccctcctatgccaactaactttgacaccattccatattacaagttcccttctatgactaaactccgtatccgtccccggtgctgtgccaggtcccacggcttgaccccggagcaggttggtggccgcttcatgctgttgatgaggagtatattgctaagtataacttttaggcccataa

SEQ ID NO: 2271 - DNA, 580 bp, Artificial
  Mutation introduced by TALE nuclease pair POT33_T03 within a POT33 allele
caagtgtgtgcaatagtagttctactactacaactctcaaaactcctttcatttcatccaatacttctttaggttccactcctaagccctctcaacttttcctccatggaaaacgtaacaaaactttcaaagtctcttgcaaagtttctaatagtggtgaccaaaaccaaaacattgaaacgaattctgttgatcgaagaaatgttcttcttggcttaggaggtctttatggtgttgctaatgctataccattagcagcatcggctactcctataccatcccctgatctcaaaacttgtggtagagccaccatatcggatggtccactagtaccctatacttgttgcccccctcctatgccaactaactttgacaccattccatattacaagttcccttctatgactaaactccgtatccggctggcgatggccaccacctgctccggggtcaagccgtggggcctggcacagcaccggcaacagccgctcatgctgttgatgaggagtatattgctaagtataatttggccataagtcgaatgaaagatcttgataagacagaccctttaaaccctctt

SEQ ID NO: 2272 - DNA, 601 bp, Artificial
  Mutation introduced by TALE nuclease pair POT33_T03 within a POT33 allele
caagtgtgtgcaatagtagttctactactacaactctcaaaactcctttcatttcatccaatacttctttaggttccactcctaagccctctcaacttttcctccatggaaaacgtaacaaaactttcaaagtctcttgcaaagtttctaatagtggtgaccaaaaccaaaacattgaaacgaattctgttgatcgaagaaatgttcttcttggcttaggaggtctttatggtgttgctaatgctataccattagcagcatcggctactcctataccatcccctgatctcaaaacttgtggtagagccaccatatcggatggtccactagtaccctatacttgttgcccccctcctatgccaactaactttgacaccattccatattacaagttcccttctatgactaaactccgtatccgtggcgattaagttgggtaacgccaggggtttttcccagtcacgacgttcgtaaaacgacggccagtgaattcgagctcggtacctcgcgaatgcatcatgctgttgatgaggagtatattgctaagtataattttggccataagtcgaatgaaagatcttgataagacagaccctttaaa

SEQ ID NO: 2273 - DNA, 577 bp, Artificial
  Mutation introduced by TALE nuclease pair POT33_T03 within a POT33 allele
caagtgtgtgcaatagtaattctactactacaactctcaaaactcctttcatttcatccaatacttctttaggttccactcctaagccctctcaacttttcctccatggaaaacgtaacaaaactttcaaagtctcttgcaaagtttctaatagtggtgaccaaaaccaaaacattgaaacgaattctgttgatcgaagaaatgttcttcttggcttaggaggtctttatggtgttgctaatgctataccattagcagcatcggctactcctataccatcccctgatctcaaaacttgtggtagagccaccatatcggatggtccactagtaccctatacttgttgcccccctcctatgccaactaactttgacaccattccatattacaagttttacggcttgacccccagcaggtggtggccatcgccagcaatggcggtggcaagcaggcgctggagacggtccagcggctgttgccggtgctgtgccaggctcatgctgttgatgaggagtatattgctaaggtataatttggccataagtcgaatgaaagatcttgataagacagacccttt

SEQ ID NO: 2274 - DNA, 578 bp, Artificial
  Mutation introduced by TALE nuclease pair POT33_T03 within a POT33 allele
caagtgtgtgcaatagtaattctactactacaactctcaaaactcctttcatttcatccaatacttctttaggttccactcctaagcccctctcaacttttcctccatggaaaacgtaacaaaactttcaaagtctcttgcaaagtttctaatagtggtgaccaaaaccaaaacattgaaacgaattctgttgatcgaagaaatgttcttcttggcttaggaggtctttatggtgttgctaatgctataccattagcagcatcggctactcctataccatcccctgatctcaaaacttgtggtagagccaccatatcggatggtccactagtaccctatacttgttgcccccctcctatgccaactaactttgacaccattccatattacaagtttacggcttgacccccagcaggtggtggcccatcgccagcaatggcggtggcaagcaggcgctggagacggtccagcggctgttgccggtgctgtgccaggctcatgctgttgatgaggagtatattgctaagtataatttggccatgaagtcgaatgaaagatcttgataagacagacccttt

SEQ ID NO: 2275 - DNA, 590 bp, Artificial; identical to SEQ ID NO: 2130
  Mutation introduced by TALE nuclease pair POT33_T03 within a POT33 allele

SEQ ID NO: 2276 - DNA, 550 bp, Artificial
  Mutation introduced by TALE nuclease pair POT33_T03 within a POT33 allele
caagtgtgtgcaatagtagttctactactacaactctcaaaactcctttcatttcatccaatacttctttaggttccactcctaagccctctcaacttttcctccatggaaaacgtaacaaaactttcaaagtctcttgcaaagtttctaatagtggtgaccaaaaccaaaacattgaaacgaattctgttgatcgaagaaatgttcttcttggcttaggaggtctttatggtgttgctaatgctataccattagcagcatcggctactcctataccatcccctgatctcaaaacttgtggtagagccaccatatcggatggtccactagtaccctatacttgttgcccccctcctcatgccaactaactttgtacaccacttccatattcacaagtcccaccggtccagcggctgttgccggtgctgtgccaggcccacggcttgacccccagcaggtggtggccatcgccagctcatgctgttgatgaggagtatattgctaagtataatttggccataagtcgaatgaaagatcttgataagacaga

SEQ ID NO: 2277 - DNA, 570 bp, Artificial
  Mutation introduced by TALE nuclease pair POT33_T03 within a POT33 allele
caagtgtgtgcaatagtagttctactactacaactctcaaaactcctttcatttcatccaatacttctttaggttccactcctaagcccctctcaacttttcctccatggaaaacgtaacaaaactttcaaagtctcttgcaaagtttctaatagtggtgaccaaaaccaaaacattgaaacgaattctgttgatcgaagaaatgttcttcttggcttaggaggtctttatggtgttgctaatgctataccattagcagcatcggctactcctataccatcccctgatctcaaaacttgtggtagagccaccatatcggatggtccactagtaccctatacttgttgcccccctcctatgccaactaactttgacaccattccatattacaagttcccttctatgactaaactccgtatccgtcccctgttccgaccctgccgcttaccggatacctgtccgcctttctccctttcggctcatgctgttgatgaggagtatattgctaagtataatttggccataagtcgaatgaaagatcttgataagacagaccctttaaaccctctt

SEQ ID NO: 2278 - DNA, 612 bp, Artificial
  Mutation introduced by TALE nuclease pair POT33_T03 within a POT33 allele
caagtgtgtgcaatagtagttctactactacaactctcaaaactcctttcatttcatccaatacttctttaggttccactcctaagcccctctcaacttttcctccatggaaaacgtaacaaaactttcaaagtctcttgcaaagtttctaatagtggtgaccaaaaccaaaacattgaaacgaattctgttgatcgaagaaatgttcttcttggcttaggaggtctttatggtgttgctaatgctataccattagcagcatcggctactcctataccatcccctgatctcaaaacttgtggtagagccaccatatcggatggtccactagtaccctatacttgttgcccccctcctatgccaactaactttgacaccattccatattacaagttcccttctatgactaaactccgtatccgttggccaggaaccgtaaaaggccgcgttgctggcgttttttccataggctccgccccctgacgagcatcacaaaatcgacgctcaagtcagaggtggcgaaaccctgctgttgatgaggagtatattgctaagtataatttggccataagtcgaatgaaaggatcttgataagacagaccctttaaaccc

SEQ ID NO: 2279 - DNA, 513 bp, Artificial
  Mutation introduced by TALE nuclease pair POT33_T03 within a POT33 allele
caagtgtgtgcaatagtagttctactactacaactctcaaaactcctttcatttcatccaatacttctttaggttccactcctaagcccctctcaacttttcctccatggaaaacgtaacaaaactttcaaagtctcttgcaaagtttctaatagtggtgaccaaaaccaaaacattgaaacgaattctgttgatcgaagaaatgttcttcttggcttaggaggtctttatggtgttgctaatgctataccattagcagcatcggctactcctataccatcccctgatctcaaaacttgtggtagagccaccatatcggatggtccactagtaccctatacttgttgcccccctcctatgccaactaactttgacaccattccatattacaagttcccttctatgactaaactccgtatccgtccccggtgctgtgccaggtccacggcttgacccggagcaggttggtggccgcttcatgctgttgatgaggagtatattgctaagtataac

SEQ ID NO: 2280 - DNA, 539 bp, Artificial
  Mutation introduced by TALE nuclease pair POT33_T03 within a POT33 allele
caagtgtgtgcaatagtagttctactactacaactctcaaaactcctttcatttcatccaatacttctttaggttccactcctaagccctctcaacttttcctccatggaaaacgtaacaaaactttcaaagtctcttgcaaagtttctaatagtggtgaccaaaaccaaaacattgaaacgaattctgttgatcgaagaaatgttcttcttggcttaggaggtctttatggtgttgctaatgctataccattagcagcatcggctactcctataccatcccctgatctcaaaacttgtggtagagccaccatatcggatggtccactagtaccctatacttgttgcccccctcctatgccaactaactttgacaccattccatattacaagttcccttctatgactaaactccgtatccgtcccacggtccagcgcctgcttgccgccatcgtggctggccgctcatgctgttgatgaggagtatattgctaagtataatttggccataagtcgaatgaaagatcttgataagacaga

SEQ ID NO: 2281 - DNA, 525 bp, Artificial
  Mutation introduced by TALE nuclease pair POT33_T03 within a POT33 allele
caagtgtgtgcaatagtagttctactactacaactctcaaaactcctttcatttcatccaatacttctttaggttccactcctaagcccctctcaacttttcctccatggaaaacgtaacaaaactttcaaagtctcttgcaaagtttctaatagtggtgaccaaaaccaaaacattgaaacgaattctgttgatcgaagaaatgttcttcttggcttaggaggtctttatggtgttgctaatgctataccattagcagcatcggctactcctataccatcccctgatctcaaaacttgtggtagagccaccatatcggatggtccactagtaccctatacttgttgcccccctcctatgccaactaactttgacaccattccatattacaagttcccttctatgactaaactccgtatccgttgctggcgatggccaccacctgctggggggctcatgctgttgatgaggagtatatttgctaagtataatttggccataagtcgaatgaaagatcttgataag

SEQ ID NO: 2282 - DNA, 578 bp, Artificial
  Mutation introduced by TALE nuclease pair POT33_T03 within a POT33 allele
caagtgtgtgcaatagtagttctactactacaactctcaaaactcctttcatttcatccaatacttctttagattccactcctaagcccctctcaacttttcctccatggaaaacgtaacaaaactttcaaagtctcttgcaaagtttctaatagtggtgaccaaaaccaaaacattgaaacgaattctgttgatcgaagaaatgttcttcttggcttaggaggtctttatggtgttgctaatgctataccattagcagcatcggctactcctataccatcccctgatctcaaaacttgtggtagagccaccatatcggatggtccactagtaccctatacttgttgcccccctcctatgccaactaactttgacaccattccatattacaagttcccttctatgactaaactccgtatccgtcccctgagatacggtgcctcactgattaagcattggtaactgtcagaccaagtttactcatagctcatgctgttgatgaggagtatattgctaagtataatttggccataagtcgaatgaaagatcttgataagacagaccctttaaaccctctt

SEQ ID NO: 2283 - DNA, 600 bp, Artificial
  Mutation introduced by TALE nuclease pair POT33_T03 within a POT33 allele
caagtgtgtgcaatagtagttctactactacaactctcaaaactcctttcatttcatccaatacttctttaggttccactcctaagcccctctcaacttttcctccatggaaaacgtaacaaaactttcaaagtctcttgcaaagtttctaatagtggtgaccaaaaccaaaacattgaaacgaattctgttgatcgaagaaatgttcttcttggcttaggaggtctttatggtgttgctaatgctataccattagcagcatcggctactcctataccatcccctgatctcaaaacttgtggtagagccaccatatcggatggtccactagtaccctatacttgttgcccccctcctatgccaactaactttgacaccattccatattacaagttcccttctatgactaaactccgtatccgtcctggggcacgtacttcagcttgtgcctcaactcggatttcttctcctccagctcggacttcaccagctggggaatcggctgatcatgctgttgatgaggagtatattgctaagtataatttggccataagtacgaatgaaagatcttgataagacagaccctttaaaccctcttgg

SEQ ID NO: 2284 - DNA, 537 bp, Artificial
  Mutation introduced by TALE nuclease pair POT33_T03 within a POT33 allele
caagtgtgtgcaatagtagttctactactacaactctcaaaactcctttcatttcatccaatacttctttaggttccactcctaagccctctcaacttttcctccatggaaaacgtaacaaaactttcaaagtctcttgcaaagtttctaatagtggtgaccaaaaccaaaacattgaaacgaattctgttgatcgaagaaatgttcttcttggcttaggaggtctttatggtgttgctaatgctataccattagcagcatcggctactcctataccatcccctgatctcaaaacttgtggtagagccaccatatcggatggtccactagtaccctatacttgttgcccccctcctatgccaactaactttgacaccattccatattacaagttcccttctatgactaaactccgtatccgtcccactgcatccagcgcaggacgcccgccgaggcaggccctcatgctgttgatgaggagtatattgctaagtataatttggccataagtcgaatgaaagatcttgataagacaga

SEQ ID NO: 2285 - DNA, 580 bp, Artificial; identical to SEQ ID NO: 2151
  Mutation introduced by TALE nuclease pair POT33_T03 within a POT33 allele

SEQ ID NO: 2286 - DNA, 637 bp, Artificial
  Mutation introduced by TALE nuclease pair POT33_T03 within a POT33 allele
caagtgtgtgcaatagtagttctactactacaactctcaaaactcctttcatttcatccaatacttctttaggttccactcctaagcccctctcaacttttcctccatggaaaacgtaacaaaactttcaaagtctcttgcaaagtttctaatagtggtgaccaaaaccaaaacattgaaacgaattctgttgatcgaagaaatgttcttcttggcttaggaggtctttatggtgttgctaatgctataccattagcagcatcggctactcctataccatcccctgatctcaaaacttgtggtagagccaccatatcggatggtccactagtaccctatacttgttgcccccctcctatgccaactaactttgacaccattccatattacaagttcccttctatgactaaactccgtatccgtccgtcgggcttcctggagccgcccaggtgcttgcccctgctagccgtacaccttcatgaagaactcggatcaagagctaccaactcttttttccgaaggtaactggcttcagcagagcgctgctcatgctgttgatgaggagtatattgctaagtataatttggccataagtcgaatgaaagatcttgataagacagaccctttaaaccctctt

SEQ ID NO: 2287 - DNA, 587 bp, Artificial
  Mutation introduced by TALE nuclease pair POT33_T03 within a POT33 allele
caagtgtgtgcaatagtaattctactactacaactctcaaaactcctttcatttcatccaatacttctttaggttccactcctaagccctctcaacttttcctccatggaaaacgtaacaaaactttcaaagtctcttgcaaagtttctaatagtggtgaccaaaaccaaaacattgaaacgaattctgttgatcgaagaaatgttcttcttggcttaggaggtctttatggtgttgctaatgctataccattagcagcatcggctactcctataccatcccctgatctcaaaacttgtggtagagccaccatatcggatggtccactagtaccctatacttgttgcccccctcctatgccaactaactttgacaccattccatattacaagttttacggcttgacccccacgcaggtggtggcccatcgccagcaatggcggtggcaagcaggcgctggagacggtccagcggctgttgccggtgctgtgccaggctcatgctgttgatgaggagtatattgctaagtataatttggccatgaagtcgaatgaaagatcttgataagacagaccctttaaaccctc

SEQ ID NO: 2288 - DNA, 590 bp, Artificial
  Mutation introduced by TALE nuclease pair POT33_T03 within a POT33 allele
  misc_feature (461): n is a or c or t or g
caagtgtgtgcaatagtagttctactactacaactctcaaaactcctttcatttcatccaatacttctttaggttccactcctaagcccctctcaacttttcctccatggaaaacgtaacaaaactttcaaagtctcttgcaaagtttctaatagtggtgaccaaaaccaaaacattgaaacgaattctgttgatcgaagaaatgttcttcttggcttaggaggtctttatggtgttgctaatgctataccattagcagcatcggctactcctataccatcccctgatctcaaaacttgtggtagagccaccatatcggatggtccactagtaccctatacttgttgcccccctcctatgccaactaactttgacaccattccatattacaagttcccttctatgactaaactccgtatccgtcccagatgcattcgcgaggtaccgagctcgaattcacnggccgtcgtttttacaacgtcgtgactggggaaaaccctgctcatgctgttgatgaggagtatattgctaagtataattttggccataagtcgaatgaaagatcttgataagacagaccctttaaaccc

SEQ ID NO: 2289 - DNA, 577 bp, Artificial; identical to SEQ ID NO: 2154
  Mutation introduced by TALE nuclease pair POT33_T03 within a POT33 allele

SEQ ID NO: 2290 - DNA, 516 bp, Artificial
  Mutation introduced by TALE nuclease pair POT33_T03 within a POT33 allele
caagtgtgtgcaatagtagttctactactacaactctcaaaactcctttcatttcatccaatacttctttaggttccactcctaagcccctctcaacttttcctccatggaaaacgtaacaaaactttcaaagtctcttgcaaagtttctaatagtggtgaccaaaaccaaaacattgaaacgaattctgttgatcgaagaaatgttcttcttggcttaggaggtctttatggtgttgctaatgctataccattagcagcatcggctactcctataccatcccctgatctcaaaacttgtggtagagccaccatatcggatggtccactagtaccctatacttgttgcccccctcctatgccaactaactttgacaccattccatattacaagttcccttctatgactaaactccgtatccgtccccggtgctgtgccaggccacggcttgaccccggagcaggttggtggccgcttcatgctgttgatgaggagtatattgctaagtataacttt

SEQ ID NO: 2291 - DNA, 514 bp, Artificial
  Mutation introduced by TALE nuclease pair POT33_T03 within a POT33 allele
caagtgtgtgcaatagtagttctactactacaactctcaaaactcctttcatttcatccaatacttctttaggttccactcctaagccctctcaacttttcctccatggaaaacgtaacaaaactttcaaagtctcttgcaaagtttctaatagtggtgaccaaaaccaaaacattgaaacgaattctgttgatcgaagaaatgttcttcttggcttaggaggtctttatggtgttgctaatgctataccattagcagcatcggctactcctataccatcccctgatctcaaaacttgtggtagagccaccatatcggatggtccactagtaccctatacttgttgcccccctcctatgccaactaactttgacaccattccatattacaagttcccttctatgactaaactccgtatccgtccccggtgctgtgccaggtccacggcttgacccggagcaggtggtggccgcttcatgctgttgatgaggagtatattgctaagtataacttt

SEQ ID NO: 2292 - DNA, 580 bp, Artificial
  Mutation introduced by TALE nuclease pair POT33_T03 within a POT33 allele
caagtgtgtgcaatagtagttctactactacaactctcaaaactcctttcatttcatccaatacttctttaggttccactcctaagcccctctcaacttttcctccatggaaaacgtaacaaaactttcaaagtctcttgcaaagtttctaatagtggtgaccaaaaccaaaacattgaaacgaattctgttgatcgaagaaatgttcttcttggcttaggaggtctttatggtgttgctaatgctataccattagcagcatcggctactcctataccatcccctgatctcaaaacttgtggtagagccaccatatcggatggtccactagtaccctatacttgttgcccccctcctatgccaactaactttgacaccattccatattacaagttcccttctatgactaaactccgtatccgtcccagatgcattcgcgaggtaccgagctcgaattcactggccgtcgtttttacaacgtcgtgactggggaaaaccctgctcatgctgttgatgaggagtatattgctaagtataatttggccataagtcgaatgaaagatcttgataagacagaccc

SEQ ID NO: 2293 - DNA, 578 bp, Artificial; identical to SEQ ID NO: 2158
  Mutation introduced by TALE nuclease pair POT33_T03 within a POT33 allele

SEQ ID NO: 2294 - DNA, 493 bp, Artificial
  Mutation introduced by TALE nuclease pair POT33_T03 within a POT33 allele
caagtgtgtgcaatagtagttctactactacaactctcaaaactgcctttcatttcatccaatacttctttaggttccactcctaagcccctctcaacttttcctccatggaaaacgtaacaaaactttcaaagtctcttgcaaagtttctaatagtggtgaccaaaaccaaaacattgaaacgaattctgttgatcgaagaaatgttcttcttggcttaggaggtctttatggtgttgctaatgctataccattagcagcatcggctactcctataccatcccctgatctcaaaacttgtggtagagccaccatatcggatggtccactagtaccctatacttgttgcccccctcctatgccaactaactttgacaccattccatattacaagttcccttcctatgactaaactccagtatccgttgctggcgatggccaccacctgctgggggctcatgctgttggatgaggagtatattgctaagtataa

SEQ ID NO: 2295 - DNA, 518 bp, Artificial
  Mutation introduced by TALE nuclease pair POT33_T03 within a POT33 allele
caagtgtgtgcaatagtagttctactactacaactctcaaaactcctttcatttcatccaatacttctttaggttccactcctaagcccctctcaacttttcctccatggaaaacgtaacaaaactttcaaagtctcttgcaaagtttctaatagtggtgaccaaaaccaaaacattgaaacgaattctgttgatcgaagaaatgttcttcttggcttaggaggtctttatggtgttgctaatgctataccattagcagcatcggctactcctataccatcccctgatctcaaaacttgtggtagagccaccatatcggatggtccactagtaccctatacttgttgcccccctcctatgccaactaactttgacaccattccatattacaagttcccttctatgactaaactccgtatccgtccccggtgctgtgccaggtcccacggcttgaccccggagcaggttggtgccgctcatgctgttgatgaggagtatattgctaagtataactttgg

SEQ ID NO: 2296 - DNA, 588 bp, Artificial
  Mutation introduced by TALE nuclease pair POT33_T03 within a POT33 allele
caagtgtgtgcaatagtagttctactactacaactctcaaaactcctttcatttcatccaatacttctttaggttccactcctaagccctctcaacttttcctccatggaaaacgtaacaaaactttcaaagtctcttgcaaagtttctaatagtggtgaccaaaaccaaaacattgaaacgaattctgttgatcgaagaaatgttcttcttggcttaggaggtctttatggtgttgctaatgctataccattagcagcatcggctactcctataccatcccctgatctcaaaacttgtggtagagccaccatatcggatggtccactagtaccctatacttgttgcccccctcctatgccaactaactttgacaccattccatattacaagttcccttctatgactaaactccgtatccgtccccagatgcattcgcgaggtaccgagctcgaattcactggccgtcgttttacaacgtcgtgactgggaaaaccctgctcatgctgttgatgaggagtatattgctaagtataattttggccataagtcgaatgaaagatcttgataagacagaccctttaaaccc

SEQ ID NO: 2297 - DNA, 474 bp, Artificial
  Mutation introduced by TALE nuclease pair POT33_T03 within a POT33 allele
caagtgtgtgcaatagtagttctactactacaactctcaaaactcctttcatttcatccaatacttctttaggttccactcctaagcccctctcaacttttcctccatggaaaacgtaacaaaactttcaaagtctcttgcaaagtttctaatagtggtgaccaaaaccaaaacattgaaacgaattctgttgatcgaagaaatgttcttcttggcttaggaggtctttatggtgttgctaatgctataccattagcagcatcggctactcctataccatcccctgatctcaaaacttgtggtagagccaccatatcggatggtccactagtaccctatacttgttgcccccctcctatgccaactaactttgacaccattccatattacaagttcccttctatgactaaactccgtatccgttgtggcgatggccaccacctgctggggggctcatgctgttgatgaggagta

SEQ ID NO: 2298 - DNA, 579 bp, Artificial
  Mutation introduced by TALE nuclease pair POT33_T03 within a POT33 allele
caagtgtgtgcaatagtaattctactactacaactctcaaaactcctttcatttcatccaatacttctttaggttccactcctaagcccctctcaacttttcctccatggaaaacgtaacaaaactttcaaagtctcttgcaaagtttctaatagtggtgaccaaaaccaaaacattgaaacgaattctgttgatcgaagaaatgttcttcttggcttaggaggtctttatggtgttgctaatgctataccattagcagcatcggctactcctataccatcccctgatctcaaaacttgtggtagagccaccatatcggatggtccactagtaccctatacttgttgcccccctcctatgccaactaactttgacaccattccatattacaagttttacggcttgacccccagcaggtggtggcccatcgccagcaatggcggtggcaagcaggcgctggagacggtccagcggctgttgccggtgctgtgccaggctcatgctgttgatgaggagtatattgctaagtataatttggccatgaagtcgaatgaaagatcttgataagacagacccttt

SEQ ID NO: 2299 - DNA, 542 bp, Artificial
  Mutation introduced by TALE nuclease pair POT33_T03 within a POT33 allele
caagtgtgtgcaatagtagttctactactacaactctcaaaactcctttcatttcatccaatacttctttaggttccactcctaagcccctctcaacttttcctccatggaaaacgtaacaaaactttcaaagtctcttgcaaagtttctaatagtggtgaccaaaaccaaaacattgaaacgaattctgttgatcgaagaaatgttcttcttggcttaggaggtctttatggtgttgctaatgctataccattagcagcatcggctactcctataccatcccctgatctcaaaacttgtggtagagccaccatatcggatggtccactagtaccctatacttgttgcccccctcctatgccaactaactttgacaccattccatattacaagttcccttctatgactaaactccgtatccgttgctggcgatggccaccacctgctggggggctcatgctgttggatgaggagtatattgctaagtataatttggccataagtcgaatgaaagatcttgataagacagaccctttaaaccc

SEQ ID NO: 2300 - DNA, 569 bp, Artificial
  Mutation introduced by TALE nuclease pair POT33_T03 within a POT33 allele
caagtgtgtgcaatagtagttctactactacaactctcaaaactcctttcatttcatccaatacttctttaggttccactcctaagcccctctcaacttttcctccatggaaaacgtaacaaaactttcaaagtctcttgcaaagtttctaatagtggtgaccaaaaccaaaacattgaaacgaattctgttgatcgaagaaatgttcttcttggcttaggaggtctttatggtgttgctaatgctataccattagcagcatcggctactcctataccatcccctgatctcaaaacttgtggtagagccaccatatcggatggtccactagtaccctatacttgttgcccccctcctatgccaactaactttgacaccattccatattacaagttcccttctatgactaaactccgtatccgtcccctctcagttcggtgtaggtcgttcgctccaagctggggctgtgtgcacgaactcatgctgttgatgaggagtatattgctaagtataatttggccataagtcgaatgaaagatcttgataagacagaccctttaaaccctctt

SEQ ID NO: 2301 - DNA, 562 bp, Artificial
  Mutation introduced by TALE nuclease pair POT33_T03 within a POT33 allele
caagtgtgtgcaatagtagttctactactacaactctcaaaactcctttcatttcatccaatacttctttaggttccactcctaagcccctctcaacttttcctccatggaaaacgtaacaaaactttcaaagtctcttgcaaagtttctaatagtggtgaccaaaaccaaaacattgaaacgaattctgttgatcgaagaaatgttcttcttggcttaggaggtctttatggtgttgctaatgctataccattagcagcatcggctactcctataccatcccctgatctcaaaacttgtggtagagccaccatatcggatggtccactagtaccctatacttgttgcccccctcctatgccaactaactttgacaccattccatattacaagttcccttctatgactaaactccgtatccgtcccctcggcgggcgtcctgcgctggatgcagtgaaaaggggattggggggatcctatctcatgctgttgatgaggagtatattgctaagtataatttggccataagtcgaatgaaagatcttgataagacagacccttt

SEQ ID NO: 2302 - DNA, 516 bp, Artificial
  Mutation introduced by TALE nuclease pair POT33_T03 within a POT33 allele
caagtgtgtgcaatagtagttctactactacaactctcaaaactcctttcatttcatccaatacttctttaggttccactcctaagcccctctcaacttttcctccatggaaaacgtaacaaaactttcaaagtctcttgcaaagtttctaatagtggtgaccaaaaccaaaacattgaaacgaattctgttgatcgaagaaatgttcttcttggcttaggaggtctttatggtgttgctaatgctataccattagcagcatcggctactcctataccatcccctgatctcaaaacttgtggtagagccaccatatcggatggtccactagtaccctatacttgttgcccccctcctatgccaactaactttgacaccattccatattacaagttcccttctatgactaaactccgtatccgtccccggtgctgtgccaggcccacggcttgaccccggagcaggtggtggccgctcatgctgttgatgaggaagtatattgctaagtataacttt

SEQ ID NO: 2303 - DNA, 656 bp, Artificial
  Mutation introduced by TALE nuclease pair POT33_T03 within a POT33 allele
caagtgtgtgcaatagtagttctactactacaactctcaaaactcctttcatttcatccaatacttctttaggttccactcctaagccctctcaacttttcctccatggaaaacgtaacaaaactttcaaagtctcttgcaaagtttctaatagtggtgaccaaaaccaaaacattgaaacgaattctgttgatcgaagaaatgttcttcttggcttaggaggtctttatggtgttgctaatgctataccattagcagcatcggctactcctataccatcccctgatctcaaaacttgtggtagagccaccatatcggatggtccactagtaccctatacttgttgcccccctcctatgccaactaactttgacaccattccatattacaagttcccttctatgactaaactccgtatccgtccccgagcgtgcgtagatcggcgatatcgatagcgtaatctggaacatcgtatggtcatgaagaactccatcaccttcatctccaccgatcgcccttcccaacagttgcgcagcctgaatggcgaatggcgcctgatgcgctcatgctgttgatgaggagtatattgctaagtataatttggccataagtcgaatgaaagatcttgataagacagaccctttaaaccctcttgg

SEQ ID NO: 2304 - DNA, 511 bp, Artificial
  Mutation introduced by TALE nuclease pair POT33_T03 within a POT33 allele
caagtgtgtgcaatagtagttctactactacaactctcaaaactcctttcatttcatccaatacttctttaggttccactcctaagcccctctcaacttttcctccatggaaaacgtaacaaaactttcaaagtctcttgcaaagtttctaatagtggtgaccaaaaccaaaacattgaaacgaattctgttgatcgaagaaatgttcttcttggcttaggaggtctttatggtgttgctaatgctataccattagcagcatcggctactcctataccatcccctgatctcaaaacttgtggtagagccaccatatcggatggtccactagtaccctatacttgttgcccccctcctatgccaactaactttgacaccattccatattacaagttcccttctatgactaaactccgtatccgtccccggtgctgctgccaggtccacggcttgaccccggagcaggtggtggccgcttcatgctgttgatgaggagtatattgctaagtat

SEQ ID NO: 2305 - DNA, 580 bp, Artificial
  Mutation introduced by TALE nuclease pair POT33_T03 within a POT33 allele
caagtgtgtgcaatagtagtctactctacacatctcaaaactcctttcatttcatccaatacttctttaggttccactcctaagcccctctcaacttttcctccatggaaaacgtaacaaaactttcaaagtctcttgcaaagtttctaatagtggtgaccaaaaccaaaacattgaaacgaattctgttgatcgaagaaatgttcttcttggcttaggaggtctttatggtgttgctaatgctataccattagcagcatcggctactcctataccatcccctgatctcaaacttgtggtagagccaccatatcggatggtccactagtaccctatacttgttgcccccctcctatgccaactaactttgacaccattccatattacaagtccagtcgggaaacctgtcgtgccagcttcccttctatgactaaactccgtatccgtccccccgagttgaggcacaagctgaagtacgtgccccacgagtacatcctcatgctgttgatgaggagtatattgctaagtataatttggccataagtcgaatgaaagatcttgataagacagaccctttaaa

SEQ ID NO: 2306 - DNA, 581 bp, Artificial
  Mutation introduced by TALE nuclease pair POT33_T03 within a POT33 allele
caagtgtgtgcaatagtagttctactactacaactctcaaaactcctttcatttcatccaatacttctttaggttccactcctaagcccctctcaacttttcctccatggaaaacgtaacaaaactttcaaagtctcttgcaaagtttctaatagtggtgaccaaaaccaaaacattgaaacgaattctgttgatcgaagaaatgttcttcttggcttaggaggtctttatggtgttgctaatgctataccattagcagcatcggctactcctataccatcccctgatctcaaaacttgtggtagagccaccatatcggatggtccactagtaccctatacttgttgcccccctcctatgccaactaactttgacaccattccatattacaagttcccttctatgactaaactccgtatccgtccctccgccccctgacgagcatcacaaaatcgacgctcaagtcagaggtggcgaaacccgacaggactataaagataccaggcgtttcctgctcatgctgttgatgaggagtatattgctaagtataatttggccataagtcgaatgaaaggatcttg

SEQ ID NO: 2307 - DNA, 582 bp, Artificial
  Mutation introduced by TALE nuclease pair POT33_T03 within a POT33 allele
caagtgtgtgcaatagtagttctactactacaactctcaaaactcctttcatttcatccaatacttctttaggttccactcctaagccctctcaacttttcctccatggaaaacgtaacaaaactttcaaagtctcttgcaaagtttctaatagtggtgaccaaaaccaaaacattgaaacgaattctgttgatcgaagaaatgttcttcttggcttaggaggtctttatggtgttgctaatgctataccattagcagcatcggctactcctataccatcccctgatctcaaaacttgtggtagagccaccatatcggatggtccactagtaccctatacttgttgcccccctcctatgccaactaactttgacaccattccatattacaagttcccttctatgactaaactccgtatccggctgggcgatggccaccacctgctccgggggtcaagccgtggggcctggcacagcaccggcaacagccgctcatgctgttgatgaggagtatattgctaagtataatttggccataagtcgaatgaaagatcttgataagacagaccctttaaaccctctt

SEQ ID NO: 2308 - DNA, 519 bp, Artificial
  Mutation introduced by TALE nuclease pair POT33_T03 within a POT33 allele
caagtgtgtgcaatagtagttctactactacaactctcaaaactcctttcatttcatccaatacttctttaggttccactcctaagcccctctcaacttttcctccatggaaaacgtaacaaaactttcaaagtctcttgcaaagtttctaatagtggtgaccaaaaccaaaacattgaaacgaattctgttgatcgaagaaatgttcttcttggcttaggaggtctttatggtgttgctaatgctataccattagcagcatcggctactcctataccatcccctgatctcaaaacttgtggtagagccaccatatcggatggtccactagtaccctatacttgttgcccccctcctatgccaactaactttgacaccattccatattacaagttcccttctatgactaaactccgtatccgtccccggtgctgtgccaggtcccacggcttgaccccggagcaggtggtggccgcttcatgctgttgatgaggagtatattgctaagtataactttgg

SEQ ID NO: 2309 - DNA, 567 bp, Artificial
  Mutation introduced by TALE nuclease pair POT33_T03 within a POT33 allele
caagtgtgtgcaatagtagttctactactacaactctcaaaactcctttcatttcatccaatacttctttaggttccactcctaagccctctcaacttttcctccatggaaaacgtaacaaaactttcaaagtctcttgcaaagtttctaatagtggtgaccaaaaccaaaacattgaaacgaattctgttgatcgaagaaatgttcttcttggcttaggaggtctttatggtgttgctaatgctataccattagcagcatcggctactcctataccatcccctgatctcaaaacttgtggtagagccaccatatcggatggtccactagtaccctatacttgttgcccccctcctatgccaactaactttgacaccattccatattacaagttcccttctatgactaaactccgtatccgtcccctctcagttcggtgtaggtcgttcgctccaagctgggctgtgtgcacgaactcatgctgttgatgaggagtatattgctaagtataatttggccataagtcgaatgaaagatcttgataagacagaccctttaaaccctctt

SEQ ID NO: 2310 - DNA, 584 bp, Artificial
  Mutation introduced by TALE nuclease pair POT33_T03 within a POT33 allele
caagtgtgtgcaatagtagttctactactacaactctcaaaactcctttcatttcatccaatacttctttaggttccactcctaagccctctcaacttttcctccatggaaaacgtaacaaaactttcaaagtctcttgcaaagtttctaatagtggtgaccaaaaccaaaacattgaaacgaattctgttgatcgaagaaatgttcttcttggcttaggaggtctttatggtgttgctaatgctataccattagcagcatcggctactcctataccatcccctgatctcaaaacttgtggtagagccaccatatcggatggtccactagtaccctatacttgttgcccccctcctatgccaactaactttgacaccattccatattacaagttcccttctatgactaaactccgtatccgtcccctccgccccctgacgagcatcacaaaattcgacgctcaagtcagaggtggcgaaacccgacaggactataaagataccaggcgtttcctgctcatgctgttgatgaggagtatattgctaagtataatttggccataagtcgaatgaaaggatcttgat

SEQ ID NO: 2311 - DNA, 485 bp, Artificial
  Mutation introduced by TALE nuclease pair POT33_T03 within a POT33 allele
caagtgtgtgcaatagtagttctactactacaactctcaaaactcctttcatttcatccaatacttctttaggttccactcctaagccctctcaacttttcctccatggaaaacgtaacaaaactttcaaagtctcttgcaaagtttctaatagtggtgaccaaaaccaaaacattgaaacgaattctgttgatcgaagaaatgttcttcttggcttaggaggtctttatggtgttgctaatgctataccattagcagcatcggctactcctataccatcccctgatctcaaaacttgtggtagagccaccatatcggatggtccctagtaccctatacttgttgcccccctcctatgcaactaactttgacaccattccatattacaagtttctatgactaaactccgtatccgtcccccttacgcattgtgcggtatttcacaccgctcatgctgttgatgaggagtatattgctaagtataa

SEQ ID NO: 2312 - DNA, 564 bp, Artificial; identical to SEQ ID NO: 2206
  Mutation introduced by TALE nuclease pair POT33_T03 within a POT33 allele

SEQ ID NO: 2313 - DNA, 570 bp, Artificial
  Mutation introduced by TALE nuclease pair POT33_T03 within a POT33 allele
caagtgtgtgcaatagtagttctactactacaactctcaaaactcctttcatttcatccaatacttctttaggttccactcctaagcccctctcaacttttcctccatggaaaacgtaacaaaactttcaaagtctcttgcaaagtttctaatagtggtgaccaaaaccaaaacattgaaacgaattctgttgatcgaagaaatgttcttcttggcttaggaggtctttatggtgttgctaatgctataccattagcagcatcggctactcctataccatcccctgatctcaaaacttgtggtagagccaccatatcggatggtccactagtaccctatacttgttgcccccctcctatgccaactaactttgacaccattccatattacaagttcccttctatgactaaactccgtatccgtccctctcagttcggtgtaggtcgttcgctccaagctggggctgtgtgcacgaactcatgctgttgatgagggagtatattgctaagtataattttggccataagtcgaatgaaagatcttgataagacagaccctttaaaccctctt

SEQ ID NO: 2314 - DNA, 584 bp, Artificial
  Mutation introduced by TALE nuclease pair POT33_T03 within a POT33 allele
caagtgtgtgcaatagtagttctactactacaactctcaaaactcctttcatttcatccaatacttctttaggttccactcctaagcccctctcaacttttcctccatggaaaacgtaacaaaactttcaaagtctcttgcaaagtttctaatagtggtgaccaaaaccaaaacattgaaacgaattctgttgatcgaagaaatgttcttcttggcttaggaggtctttatggtgttgctaatgctataccattagcagcatcggctactcctataccatcccctgatctcaaaacttgtggtagagccaccatatcggatggtccactagtaccctatacttgttgcccccctcctatgccaactaactttgacaccattccatattacaagttcccttctatgactaaactccgtatccgtccccagatgcattcgcgaggtaccgagctcgaattcactggccgtcgtttttacaacgtcgtgactgggaaaaccctgctcatgctgttgatgaggagtatattgctaagtataattttggccataagtcgaatgaaagatcttgataagacagacccttt

SEQ ID NO: 2315 - DNA, 570 bp, Artificial
  Mutation introduced by TALE nuclease pair POT33_T03 within a POT33 allele
caagtgtgtgcaatagtagttctactactacaactctcaaaactcctttcatttcatccaatacttctttaggttccactcctaagcccctctcaacttttcctccatggaaaacgtaacaaaactttcaaagtctcttgcaaagtttctaatagtggtgaccaaaaccaaaacattgaaacgaattctgttgatcgaagaaatgttcttcttggcttaggaggtctttatggtgttgctaatgctataccattagcagcatcggctactcctataccatcccctgatctcaaaacttgtggtagagccaccatatcggatggtccactagtaccctatacttgttgcccccctcctatgccaactaactttgacaccattccatattacaagttcccttctatgactaaactccgtatccgtcccctccagcgcctgcttgccgccatcgtgccaggcgatggccaccacctgacccctcatgctgttgatgaggagtatattgctaagtataatttggccataagtcgaatggaagatcttgataagacagaccctttaaaccctctt

SEQ ID NO: 2316 - DNA, 604 bp, Artificial
  Mutation introduced by TALE nuclease pair POT33_T03 within a POT33 allele
caagtgtgtgcaatagtagttctactactacaactctcaaaactcctttcatttcatccaatacttctttaggttccactcctaagcccctctcaacttttcctccatggaaaacgtaacaaaactttcaaagtctcttgcaaagtttctaatagtggtgaccaaaaccaaaacattgaaacgaattctgttgatcgaagaaatgttcttcttggcttaggaggtctttatggtgttgctaatgctataccattagcagcatcggctactcctataccatcccctgatctcaaaacttgtgtagagccaccatatcggatggtccactagtaccctatacttgttgcccccctcctatgccaactaactttgacaccattccatattacaagttcccttctatgactaaactccgtatccgtggcgattaagttggggtaacgccaggggtttttcccagtcacgacgttgtaaaacgacggccagtgaattcgagctcggtacctcgcgaatgcatcatgctgttgatgaggagtatattgctaagtataatttggccataagtcgaatgaaaggatcttgataagacagaccctttaaaccc

SEQ ID NO: 2317 - DNA, 568 bp, Artificial
  Mutation introduced by TALE nuclease pair POT33_T03 within a POT33 allele
cagtgtgatgcatagtagtctactactacaactctcaaaactcctttcatttcatccaatacttctttaggttccactcctaagcccctctcaacttttcctccatggaaaacgtaacaaaactttcaaagtctcttgcaaagtttctaatagtggtgaccaaaaccaaaacattgaaacgaattctgttgatcgaagaaatgttcttcttggcttaggaggtctttatggtgttgctaatgctataccattagcagcatcggctactcctataccatcccctgatctcaaaacttgtggtagagccaccatatcggatggtccactagtaccctatacttgttgcccccctcctatgccaactaactttgacaccattccatattacaagttcccttctatgactaaactccgtatccgtcccctccagcgcctgcttgccgccatcgtgccaggcgatggccaccacctgacccctcatgctgttgatgaggagtatattgctaagtataatttggccataagtcgaatgaaagatcttgataagacagaccctttaaaccctctt

SEQ ID NO: 2318 - DNA, 464 bp, Artificial
  Mutation introduced by TALE nuclease pair POT33_T03 within a POT33 allele
caagtgtgtgcaatagtagttctactactacaactctcaaaactcctttcatttcatccaatacttctttaggttccactcctaagcccctctcaacttttcctccatggaaaacgtaacaaaactttcaaagtctcttgcaaagtttctaatagtggtgaccaaaaccaaaacattgaaacgaattctgttgatcgaagaaatgttcttcttggcttaggaggtctttatggtgttgctaatgctataccattagcagcatcggctactcctataccatcccctgatctcaaaacttgtggtagagccaccatatcggatggtccactagtaccctatacttgttgcccccctcctatgccaactaactttgacaccattccatattacaagttcccttctatgactaaactccgtatccgtccccggtttttttgtttgcaagcagcagattacgcgcagag

SEQ ID NO: 2319 - DNA, 580 bp, Artificial
  Mutation introduced by TALE nuclease pair POT33_T03 within a POT33 allele
caagtgtgtgcaatagtagttctactactacaactctcaaaactcctttcatttcatccaatacttctttaggttccactcctaagcccctctcaacttttcctccatggaaaacgtaacaaaactttcaaagtctcttgcaaagtttctaatagtggtgaccaaaaccaaaacattgaaacgaattctgttgatcgaagaaatgttcttcttggcttaggaggtctttatggtgttgctaatgctataccattagcagcatcggctactcctataccatcccctgatctcaaaacttgtggtagagccaccatatcggatggtccactagtaccctatacttgttgcccccctcctatgccaactaactttgacaccattccatattacaagttcccttctatgactaaactccgtatccggctggcgatggccaccacctgctccggggtcaagccgtgggcctggcacagcaccggcaacagccgctcatgctgttgatgaggagtatattgctaagtataatttggccataagtcgaatgaaagatcttgataagacagaccctttaaaccctctt

SEQ ID NO: 2320 - DNA, 581 bp, Artificial
  Mutation introduced by TALE nuclease pair POT33_T03 within a POT33 allele
caagtgtgtgcaatagtagttctactactacaactctcaaaactcctttcatttcatccaatacttctttaggttccactcctaagcccctctcaacttttcctccatggaaaacgtaacaaaactttcaaagtctcttgcaaagtttctaatagtggtgaccaaaaccaaaacattgaaacgaattctgttgatcgaagaaatgttcttcttggcttaggaggtctttatggtgttgctaatgctataccattagcagcatcggctactcctataccatcccctgatctcaaaacttgtggtagagccaccatatcggatggtccactagtaccctatacttgttgcccccctcctatgccaactaactttgacaccattccatattacaagttcccttctatgactaaactccgtatccggctggcgatggccaccacctgctccggggtcaagccgtgggcctggcacagcaccggcaacagccgctcatgctgttgatgagggagtatattgctaagtataatttggccataagtcgaatgaaagatcttgataagacagaccctttaaaccctctt

SEQ ID NO: 2321 - DNA, 538 bp, Artificial
  Mutation introduced by TALE nuclease pair POT33_T03 within a POT33 allele
caagtgtgtgcaatagtagttctactactacaactctcaaaactcctttcatttcatccaatacttctttaggttccactcctaagcccctctcaacttttcctccatggaaaacgtaacaaaactttcaaagtctcttgcaaagtttctaatagtggttaccaaaaccaaaacattgaaacgaattctgttgatcgaagaaatgttcttcttggcttaggaggtctttatggtgttgctaatgctataccattagcagcatcggctactcctataccatcccctgatctcaaaacttgtggtagagccaccatatcggatggtccactagtaccctatacttgttgcccccctcctatgccaactaactttgacaccattccatattacaagttcccttctatgactaaactccgtatccgtcccactgcatccagcgcaggacgcccgccgaggcaggccctcatgctgttgatgaggagtatattgctaagtataatttggccataagtcgaatgaaagatcttgataagacaga

SEQ ID NO: 2322 - DNA, 464 bp, Artificial
  Mutation introduced by TALE nuclease pair POT33_T03 within a POT33 allele
caagtgtgtgcaatagtagttctactactacaactctcaaaactcctttcatttcatccaatacttcttttaggttccactcctaagcccctctcaacttttcctccatggaaaacgtaacaaaactttcaaagtctcttgcaaagtttctaatagtggtgaccaaaaccaaaacattgaaacgaattctgttgatcgaagaaatgttcttcttggcttaggaggtctttatggtgttgctaatgctataccattagcagcatcggctactcctataccatcccctgatctcaaaacttgtggtagagccaccatatcggatggtccactagtaccctatacttgttgcccccctcctatgccaactaactttgacaccattccatattacaagttcccttctatgactaaactccgtatccgtccctccccgcgcgttgccgattcattaatgcagctggcac

SEQ ID NO: 2323 - DNA, 552 bp, Artificial
  Mutation introduced by TALE nuclease pair POT33_T03 within a POT33 allele
caagtgtgtgcaatagtagttctactactacaactctcaaaactcctttcatttcatccaatacttctttaggttccactcctaagccctctcaacttttcctccatggaaaacgtaacaaaactttcaaagtctcttgcaaagtttctaatagtggtgaccaaaaccaaaacattgaaacgaattctgttgatcgaagaaatgttcttcttggcttaggaggtctttatggtgttgctaatgctataccattagcagcatcggctactcctataccatcccctgatctcaaaacttgtggtagagccaccatatcggatggtccactagtaccctatacttgttgcccccctcctatgccaactaactttgacaccattccatattacaagttcccttctatgactaaactccgtatccgtcccacggtccagcgcctgcttgccgccatcgtggctggccgctcatgctgttgatgaggagtatattgctaagtataatttggccataagtcgaatgaaagatcttgataagacagaccctttaaaccct

SEQ ID NO: 2324 - DNA, 577 bp, Artificial; identical to SEQ ID NO: 2221
  Mutation introduced by TALE nuclease pair POT33_T03 within a POT33 allele

SEQ ID NO: 2325 - DNA, 455 bp, Artificial
  Mutation introduced by TALE nuclease pair POT33_T03 within a POT33 allele
caagtgtgtgcaatagtagttctactactacaactctcaaaactcctttcatttcatccaatacttctttaggttccactcctaagcccctctcaactttttcctccatggaaaacgtaacaaaactttcaaagtctcttgcaaagtttctaatagtggtgaccaaaaccaaaacattgaaacgaattctgttgatcgaagaaatgttcttcttggcttaggaggtctttatggtgttgctaatgctataccattagcagcatcggctactcctataccatcccctgattctcaaaacttgtggtagagccaccatatcggatggtccactagtaccctatacttgttgcccccctcctatgccaactaacttttgacaccattccatattacaagtttcccttctatgacctaaactccgtatccgtcccccggtgctgtgccaggcccacggc

SEQ ID NO: 2326 - DNA, 549 bp, Artificial; identical to SEQ ID NO: 2225
  Mutation introduced by TALE nuclease pair POT33_T03 within a POT33 allele

SEQ ID NO: 2327 - DNA, 555 bp, Artificial
  Mutation introduced by TALE nuclease pair POT33_T03 within a POT33 allele
caagtgtgtgcaatagtagttctactactacaactctcaaaactcctttcatttcatccaatacttctttaggttccactcctaagcccctctcaacttttcctccatggaaaacgtaacaaaactttcaaagtctcttgcaaagtttctaatagtggtgaccaaaaccaaaacattgaaacgaattctgttgatcgaagaaatgttcttcttggcttaggaggtctttatggtgttgctaatgctataccattagcagcatcggctactcctataccatcccctgatctcaaaacttgtggtagagccaccatatcggatggtccactagtaccctatacttgttgcccccctcctatgccaactaactttgacaccattccatattacaagttcccttctatgactaaactccgtatccgtccccagatgcattcgcgaggtaccgagctcgaattcactggccgtcgttttacaacgtcgtgactgggaaaccctgctcatgctgttgatgaggagtatattgctaagtataatttggccataagtcgaatg

SEQ ID NO: 2328 - DNA, 568 bp, Artificial
  Mutation introduced by TALE nuclease pair POT33_T03 within a POT33 allele
caagtgtgtgcaatagtagttctactactacaactctcaaaactcctttcatttcatccaatacttctttaggttccactcctaagcccctctcaacttttcctccatggaaaacgtaacaaaactttcaaagtctcttgcaaagtttctaatagtggtgaccaaaaccaaaacattgaaacgaattctgttgatcgaagaaatgttcttcttggcttaggaggtctttatggtgttgctaatgctataccattagcagcatcggctactcctataccatcccctgatctcaaaacttgtggtagagccaccatatcggatggtccactagtaccctatacttgttgcccccctcctatgccaactaactttgacaccattccatattacaagttcccttctatgactaaactccgtatccgtcccctcggcgggcgtcctgcgctggatgcagtgaaaaggggattggggggatcctatctcatgctgttgatgaggagtatattgctaagtataatttggccataagtcgaatgaagatcttgataagacagaccctttaaaccct

SEQ ID NO: 2329 - DNA, 626 bp, Artificial
  Mutation introduced by TALE nuclease pair POT33_T03 within a POT33 allele
caagtgtgtgcaatagtagttctactactacaactctcaaaactcctttcatttcatccaatacttctttaggttccactcctaagcccctctcaacttttcctccatggaaaacgtaacaaaactttcaaagtctcttgcaaagtttctaatagtggtgaccaaaaccaaaacattgaaacgaattctgttgatcgaagaaatgttcttcttggcttaggaggtctttatggtgttgctaatgctataccattagcagcatcggctactcctataccatcccctgatctcaaaacttgtggtagagccaccatatcggatggtccactagtaccctatacttgttgcccccctcctatgccaactaactttgacaccattccatattacaagttcccttctatgactaaactccgtatccgtccagacgtttcactgtcggccagtatttgtctgccacacctgccggggaataccgcaacttcacggctgtacggatgcgcccactcggcgaccagttcgctctgaatgtgcggcgctcatgctgttgatgaggagtatattgctaagtataatttggccataagtcgaatgaaagatcttgataagacagaccctttaaaccc

SEQ ID NO: 2330 - DNA, 460 bp, Artificial
  Mutation introduced by TALE nuclease pair POT33_T03 within a POT33 allele
caagtgtgtgcaatagtagttctactactacaactctcaaaacctcctttcatttcatccaatacttctttaggttccactcctaagccctctcaacttttcctccatggaaaacgtaacaaaactttcaaagtctcttgcaaagtttctaatagtggtgaccaaaaccaaaacattgaaacgaattctgttgatcgaagaaatgttcttcttggcttaggaggtctttatggtgttgctaatgctataccattagcagcatcggctactcctataccatcccctgatctcaaaacttgtggtagagccaccatatcggatggtccactagtaccctatacttgttgcccccctcctatgccaactaactttgacaccattccatattacaagttcccttctatgactaaactccgtatccgtcccctgggatcagctttttatagcaaccggcgccatc

SEQ ID NO: 2331 - DNA, 70 bp, Solanum tuberosum
  POT32 sequence
ttctatgactaagctccgtgttcgtcagcctgctcatgaagctaatgaggagtatattgccaagtacaat

SEQ ID NO: 2332 - DNA, 63 bp, Artificial
  POT32 sequence with 7 bp deletion
ttctatgactaagctccgtgttcgtcagcctgctctaatgaggagtatattgccaagtacaat

SEQ ID NO: 2333 - DNA, 59 bp, Artificial
  POT32 sequence with 11 bp deletion
ttctatgactaagctccgtgttcgtcagccttaatgaggagtatattgccaagtacaat

SEQ ID NO: 2334 - DNA, 39 bp, Artificial
  POT32 sequence with 75 bp deletion
cctaagcctgatgatatggagtatattgccaagtacaat

SEQ ID NO: 2335 - DNA, 80 bp, Solanum tuberosum
  POT32 sequence
acaagttcccttctatgactaagctccgtgttcgtcagcctgctcatgaagctaatgaggagtatattgccaagtacaat

SEQ ID NO: 2336 - DNA, 74 bp, Artificial
  POT32 sequence with 6 bp deletion
acaagttcccttctatgactaagctccgtgttcgtcagcctgctcataatgaggagtatattgccaagtacaat

SEQ ID NO: 2337 - DNA, 71 bp, Artificial
  POT32 sequence with 9 bp deletion
acaagttcccttctatgactaagctccgtgttcgtcagcctgctaatgaggagtatattgccaagtacaat

SEQ ID NO: 2338 - DNA, 64 bp, Artificial
  POT32 sequence with 16 bp deletion
acaagttcccttctatgactaagctccgtgttcgtctaatgaggagtatattgccaagtacaat

SEQ ID NO: 2339 - DNA, 34 bp, Artificial
  POT32 sequence with 46 bp deletion
acaagttcccttctatgactaagctccgtacaat

SEQ ID NO: 2340 - DNA, 558 bp, Solanum tuberosum
  StPOT32 allele 1
acaaattctgttgatcgaagaaatgttcttcttggcttaggtggtctttatggtgttgctaatgctataccattagctgcatccgctgctccagctccacctcctgatctctcgtcttgtagtatagccaggattaacgaaaatcaggtggtgccgtacagttgttgcgcgcctaagcctgatgatatggagaaagttccgtattacaagttcccttctatgactaagctccgtgttcgtcagcctgctcatgaagctaatgaggagtatattgccaagtacaatctggcgattagtcgaatgaaagatcttgataagacacaacctttaaaccctattggttttaagcaacaagctaatatacattgtgcttattgtaacggtgcttatagaattggtggcaaagagttacaagttcataattcttggcttttcttcccgttccatagatggtacttgtacttccacgagagaatcgtgggaaaattcattgatgatccaactttcgctttaccatattggaattgggaccatccaaaaggtatgcgttttcctgcc

SEQ ID NO: 2341 - DNA, 558 bp, Solanum tuberosum
  StPOT32 allele 2
acgaattctgttgatcgaagaaatgttcttcttggcttaggtggtctttatggtgttgctaatgctataccattagctgcatccgctgctccaactccacctcctgatctctcgtcttgtagtatagccaggattaacgaaaatcaggtggtgccgtacagttgttgcgcgcctaagcctgatgatatggagaaagttccgtattacaagttcccttctatgactaagctccgtgttcgtcagcctgctcatgaagctaatgaggagtatattgccaagtacaatctggcgattagtcgaatgagagatcttgataagacacaacctttaaaccctattggttttaagcaacaagctaatatacattgtgcttattgtaatggtgcttatagaattggtggcaaagagttacaagttcataattcttggcttttcttcccgttccatagatggtacttgtacttccacgagagaatcgtgggaaaattcattgatgatccaactttcgctttgccatattggaattgggaccatccaaagggtatgcgttttcctgcc

SEQ ID NO: 2342 - DNA, 767 bp, Solanum tuberosum
  StPOT33 allele 1
caatacttctttaggttccactcctaagccctctcaacttttcctccatggaaaacgtaacaaaactttcaaagtctcttgcaaagtttctaatagtggtgaccaaaaccaaaacattgaaacgaattctgttgatcgaagaaatgttcttcttggcttaggaggtctttatggtgttgctaatgctataccattagcagcatcggctactcctataccatcccctgatctcaaaacttgtggtagagccaccatatcggatggtccactagtaccctatacttgttgcccccctcctatgccaactaactttgacaccattccatattacaagttcccttctatgactaaactccgtatccgtccccctgctcatgctgttgatgaggagtatattgctaagtataatttggccataagtcgaatgaaagatcttgataagacagaccctttaaaccctcttgggtttaagcaacaagcaaatatacattgtgcttattgtaacggtgcttatataattggtggcaaagagttacaagttcataactcatggcttttcttcccgttccatagatggtacttatacttctacgagagaatattgggaaaactcatcgatgatccaactttcgctttaccatattggaattgggatcatccaaagggcatgcgtttacctcccatgttcgatcgtgaaggaacttctatttacgacgaaaggcgtaatcaacaagtccgtaacggaaccgttatggatcttggttcat

SEQ ID NO: 2343 - DNA, 760 bp, Solanum tuberosum
  StPOT33 allele 2
ctccacttctttaggttccactcctaagccctctcaacttttcctccatggaaaacgtaacaaaacgttcaaagtctcatgcaaagtttcgaatagtggtgaccaaaaccaaagcgttgaaacgaattctgttgatcgaagaaatgttcttcttggtttaggaggtctatatggtgttgctaatgctataccattagctgcatccgctgctcctacgccacctcctgatctcaaaacttgtagtagagccaccatatcggatggtccactagtaccctatacttgttgccctcctcctatgccaactgctaactttgacaccattccatattacaagttccctcctatgactaagctccgtatccgtccccctgctcatgctgttgatgaggagtatattgctaagtataatttggccataagtcgaatgaaagatcttgataagacagaaccgttaaaccctcttgggtttaagcaacaagccaatatacattgtgcttattgtaacggtgcttatataattggtggcaaagagttacaagttcataactcatggattttcttcccgttccatagatggtacttatacttctacgagagaatattgggaaaactcattgatgatccaactttcgctttgccatattggaattgggatcatccaaagggcatgcgtttacctcccatgttcgatcgtgaaggaacttctatttacgacgaaaggcgtaatccacaagtccgtaacggaaccgttttggat

SEQ ID NO: 2344 - protein, 597 aa, Solanum tuberosum
  StPOT32 protein sequence
MASLCNSSSTSLKTPFTSSSTSLSSTPKPSQLFIHGKRNQMFKVSCKVTNNNGDQNQNVETNSVDRRNVLLGLGGLYGVANAIPLAASAAPAPPPDLSSCSIARINENQVVPYSCCAPKPDDMEKVPYYKFPSMTKLRVRQPAHEANEEYIAKYNLAISRMKDLDKTQPLNPIGFKQQANIHCAYCNGAYRIGGKELQVHNSWLFFPFHRWYLYFHERIVGKFIDDPTFALPYWNWDHPKGMRFPAMYDREGTSLFDVTRDQSHRNGAVIDLGFFGNEVETTQLQLMSNNLTLMYRQMVTNAPCPRMFFGGPYDLGVNTELPGTIENIPHGPVHIWSGTVRGSTLPNGAISNGENMGHFYSAGLDPVFFCHHSNVDRMWSEWKATGGKRTDITHKDWLNSEFFFYDENENPYRVKVRDCLDTKKMGYDYKPIATPWRNFKPLTKASAGKVNTASLPPASNVFPLAKLDKAISFSINRPTSSRTQQEKNAQEEMLTFSSIRYDNRGYIRFDVFSNVDNNVNANELDKAEFAGSYTSLPHVHRAGETNHIATVDFQLAITELLEDIGLEDEDTIAVTLVPKRGGEGISIEGATISLADC

SEQ ID NO: 2345 - protein, 599 aa, Solanum tuberosum
  StPOT33 protein sequence
MASVCNSSSTTTTLKTPFISSNTSLGSTPKPSQLFLHGKRNKTFKVSCKVSNSGDQNQNIETNSVDRRNVLLGLGGLYGVANAIPLAASATPIPSPDLKTCGRATISDGPLVPYTCCPPPMPTNFDTIPYYKFPSMTKLRIRPPAHAVDEEYIAKYNLAISRMKDLDKTDPLNPLGFKQQANIHCAYCNGAYIIGGKELQVHNSWLFFPFHRWYLYFYERILGKLIDDPTFALPYWNWDHPKGMRLPPMFDREGTSIYDERRNQQVRNGTVMDLGSFGDKVQTTQLQLMSNNLTLMYRQMVTNAPCPLLFFGAPYVLGNNVEAPGTIENIPHIPVHIWAGTVRGSTFPNGDTSYGEDMGNFYSAGLDPVFYCHHGNVDRMWNEWKAIGGKRRDLSEKDWLNSEFFFYDENKKPYRVKVRDCLDAKKMGYDYAPMPTPWRNFKPKTKASVGKVNTTTLPPVNKVFPLTKMDKAISFSINRPASSRTQQEKNEQEEMLTFDNIKYDNRGYIRFDVFLNVDNNVNANELDKAEFAGSYTSLPHVHRVGENDHTATVTFQLAITELLEDIGLEDEETIAVTLVPKKGGEGISIENVEIKLLDC

SEQ ID NO: 2346 - DNA, 17 bp, Solanum tuberosum
  POT32 CuA TALE-nuclease left binding site
tcttggcttttcttccc

SEQ ID NO: 2347 - DNA, 17 bp, Solanum tuberosum
  POT32 CuA TALE-nuclease right binding site
cttgtacttccacgaga

SEQ ID NO: 2348 - DNA, 17 bp, Solanum tuberosum
  POT32 CuA TALE-nuclease left binding site
ttggcttttcttcccgt

SEQ ID NO: 2349 - DNA, 17 bp, Solanum tuberosum
  POT32 CuA TALE-nuclease right binding site
tgtacttccacgagaga

SEQ ID NO: 2350 - DNA, 17 bp, Solanum tuberosum
  POT32 CuB TALE-nuclease left binding site
tggtctggtacagtgag

SEQ ID NO: 2351 - DNA, 17 bp, Solanum tuberosum
  POT32 CuB TALE-nuclease right binding site
caatggtgcaatatcaa

SEQ ID NO: 2352 - DNA, 17 bp, Solanum tuberosum
  POT33 CuA TALE-nuclease left binding site
tggcttttcttcccgtt

SEQ ID NO: 2353 - DNA, 17 bp, Solanum tuberosum
  POT33 CuA TALE-nuclease right binding site
tatacttctacgagaga

SEQ ID NO: 2354 - DNA, 17 bp, Solanum tuberosum
  POT33 CuB TALE-nuclease left binding site
tacctgtccatatttgg

SEQ ID NO: 2355 - DNA, 17 bp, Solanum tuberosum
  POT33 CuB TALE-nuclease right binding site
ggttcaacatttcctaa

SEQ ID NO: 2356 - DNA, 17 bp, Solanum tuberosum
  POT33 CuB TALE-nuclease left binding site
ttgggctggtacagtac

SEQ ID NO: 2357 - DNA, 17 bp, Solanum tuberosum
  POT33 CuB TALE-nuclease right binding site
ctaatggtgatacgtca

SEQ ID NO: 2358 - DNA, 17 bp, Solanum tuberosum
  POT33 CuB TALE-nuclease left binding site
tcctaatggtgatacgt

SEQ ID NO: 2359 - DNA, 17 bp, Solanum tuberosum
  POT33 CuB TALE-nuclease right binding site
tgggtaatttctactca

SEQ ID NO: 2360 - DNA, 17 bp, Solanum tuberosum
  POT33 CuB TALE-nuclease left binding site
tgggtaatttctactca

SEQ ID NO: 2361 - DNA, 17 bp, Solanum tuberosum
  POT33 CuB TALE-nuclease right binding site
gttttctattgccacca

SEQ ID NO: 2362 - DNA, 17 bp, Solanum tuberosum
  POT33 CuB TALE-nuclease left binding site
tagacccggttttctat

SEQ ID NO: 2363 - DNA, 17 bp, Solanum tuberosum
  POT33 CuB TALE-nuclease right binding site
gtggaccgtatgtggaa

What is claimed is:

1. A Solanum plant, plant part, or plant cell comprising a mutation in at least one polyphenol oxidase (PPO) allele endogenous to said plant, plant part, or plant cell, such that said plant, plant part, or plant cell has reduced expression of PPO as compared to a control Solanum plant, plant part, or plant cell that lacks said mutation.

2. The plant, plant part, or plant cell of claim 1, wherein each said mutation is a deletion of more than one nucleotide base pair.

3. The plant, plant part, or plant cell of claim 1, wherein each said mutation is at a target sequence as set forth in SEQ ID NO:2340 or 2341, or at a target sequence having at least 95 percent identity to SEQ ID NO:2340 or 2341.

4. The plant, plant part, or plant cell of claim 1, wherein each said mutation is at a target sequence as set forth in SEQ ID NO:2342 or 2343, or at a target sequence having at least 95 percent identity to SEQ ID NO:2342 or 2343.

5. The plant, plant part, or plant cell of claim 1, wherein said mutation was made using a rare-cutting endonuclease.

6. The plant, plant part, or plant cell of claim 5, wherein said rare-cutting endonuclease is a transcription activator-like effector endonuclease (TALE-nuclease).

7. The plant, plant part, or plant cell of claim 6, wherein said TALE-nuclease binds to a sequence as set forth in any of SEQ ID NOS:3-14 or 2346-2363.

8. The plant, plant part, or plant cell of claim 1, wherein said at least one PPO allele exhibits removal of an endogenous nucleic acid and does not include any exogenous nucleic acid.

9. The plant, plant part, or plant cell of claim 1, wherein said at least one PPO allele is a POT32 allele or a POT33 allele.

10. The plant, plant part, or plant cell of claim 9, wherein said at least one PPO allele is one or more POT32 alleles, and wherein said one or more POT32 alleles comprise one or more sequences selected from the group consisting of SEQ ID NO:2332, SEQ ID NO:2333, and SEQ ID NO:2334.

11. The plant, plant part, or plant cell of claim 9, wherein said at least one PPO allele is one or more POT32 alleles, and wherein said one or more POT32 alleles comprise one or more sequences selected from the group consisting of SEQ ID NO:2336, SEQ ID NO:2337, SEQ ID NO:2338, and SEQ ID NO:2339.

12. The plant, plant part, or plant cell of claim 9, wherein every endogenous allele of POT32 is mutated, every endogenous allele of POT33 is mutated, or every endogenous allele of both POT32 and POT33 is mutated.

13. The plant, plant part, or plant cell of claim 12, wherein each said POT32 allele, each said POT33 allele, or each said POT32 and POT33 allele exhibits removal of an endogenous nucleic acid and does not include any exogenous nucleic acid.

14. The plant, plant part, or plant cell of claim 1, wherein said plant, plant part, or plant cell has no detectable expression of PPO.

15. The plant, plant part, or plant cell of claim 1, wherein said Solanum plant, plant part, or plant cell is a Solanum tuberosum plant, plant part, or plant cell.

16. The plant, plant part, or plant cell of claim 1, wherein said plant, plant part, or plant cell has decreased levels of quinones as compared to a control plant, plant part, or plant cell that lacks said mutation.

17. A method for making a Solanum plant that has reduced expression of PPO, wherein said method comprises:
(a) contacting a population of Solanum plant cells comprising at least one functional endogenous PPO allele with one or more rare-cutting endonucleases targeted to said at least one PPO allele,
(b) selecting, from said population, a cell in which said at least one PPO allele has been mutated, and
(c) growing said selected plant cell into a Solanum plant, wherein said Solanum plant has reduced expression of PPO as compared to a control Solanum plant in which said at least one PPO allele has not been mutated.

18. The method of claim 17, wherein said Solanum plant cells are protoplasts.

19. The method of claim 18, comprising transforming said protoplasts with a nucleic acid encoding said rare-cutting endonuclease.

20. The method of claim 19, wherein said nucleic acid is an mRNA.

21. The method of claim 19, wherein said nucleic acid is contained within a vector.

22. The method of claim 18, comprising introducing into said protoplasts a rare-cutting endonuclease protein.

23. The method of claim 17, wherein said one or more rare-cutting endonucleases comprise a TALE-nuclease.

24. The method of claim 23, wherein said TALE-nuclease is targeted to a sequence as set forth in SEQ ID NO: 2340 or 2341, or to a sequence having at least 95 percent identity to the sequence set forth in SEQ ID NO: 2340 or 2341.

25. The method of claim 23, wherein said TALE-nuclease is targeted to a sequence as set forth in SEQ ID NO: 2342 or 2343, or to a sequence having at least 95 percent identity to the sequence set forth in SEQ ID NO: 2342 or 2343.

26. The method of claim 23, wherein said TALE-nuclease binds to a sequence as set forth in any of SEQ ID NOS:3-14 or 2346-2363.

27. The method of claim 17, wherein said at least one PPO allele is a POT32 allele or a POT33 allele.

28. The method of claim 27, wherein said at least one PPO allele is one or more POT32 alleles, and wherein said one or more POT32 alleles comprise one or more sequences selected from the group consisting of SEQ ID NO:2332, SEQ ID NO:2333, and SEQ ID NO:2334.

29. The method of claim 27, wherein said at least one PPO allele is one or more POT32 alleles, and wherein said one or more POT32 alleles comprise one or more sequences selected from the group consisting of SEQ ID NO:2336, SEQ ID NO:2337, SEQ ID NO:2338, and SEQ ID NO:2339.

30. The method of claim 17, wherein said Solanum plant cells are protoplasts, and wherein said method further comprises culturing said protoplasts to generate plant lines.

31. The method of claim 17, wherein said Solanum plant cells are protoplasts, and wherein said method further comprises isolating genomic DNA comprising at least a portion of the PPO locus from said protoplasts.

32. The method of claim 17, wherein said Solanum plant cells are S. tuberosum plant cells.

33. A method for producing a bruising resistant potato product, comprising:
(a) providing a Solanum plant or plant part that comprises a mutation in at least one PPO allele endogenous to said plant or plant part, such that said plant, plant part, or plant cell has reduced expression of PPO as compared to a control Solanum plant or plant part that lacks said mutation; and
(b) producing a bruising resistant potato product from said plant or plant part.

34. The method of claim 33, wherein said mutation is at a target sequence as set forth in SEQ ID NO: 2340 or 2341, or at a target sequence having at least 95 percent identity to SEQ ID NO: 2340 or 2341.

35. The method of claim 33, wherein said mutation is at a target sequence as set forth in SEQ ID NO: 2342 or 2343, or at a target sequence having at least 95 percent identity to SEQ ID NO: 2342 or 2343.

36. The method of claim 33, wherein said mutation was made using a rare-cutting endonuclease.

37. The method of claim 36, wherein said rare-cutting endonuclease is a TALE-nuclease.

38. The method of claim 37, wherein said TALE-nuclease binds to a sequence as set forth in any of SEQ ID NOS: 3-14 or 2346-2363.

39. The method of claim 33, wherein said at least one PPO allele is a POT32 allele or a POT33 allele.

40. The method of claim 39, wherein said at least one PPO allele is one or more POT32 alleles, and wherein said one or more POT32 alleles comprise one or more sequences selected from the group consisting of SEQ ID NO:2332, SEQ ID NO:2333, and SEQ ID NO:2334.

41. The method of claim 39, wherein said at least one PPO allele is one or more POT32 alleles, and wherein said one or more POT32 alleles comprise one or more sequences selected from the group consisting of SEQ ID NO:2336, SEQ ID NO:2337, SEQ ID NO:2338, and SEQ ID NO:2339.

42. The method of claim 33, wherein said Solanum plant or plant part is a S. tuberosum plant or plant part.

43. The method of claim 33, wherein said Solanum plant or plant part has no detectable expression of PPO.

44. A bruising resistant tuber generated from a Solanum plant or plant part that comprises a mutation in at least one PPO allele, such that said bruising resistant tuber has reduced expression of PPO as compared to a control Solanum plant, plant part, or plant cell that lacks said mutation.

45. The bruising resistant tuber of claim 44, wherein each said mutation is a deletion of more than one nucleotide base pair.

46. The bruising resistant tuber of claim 44, wherein each said mutation is at a target sequence as set forth in SEQ ID NO: 2340 or 2341, or at a target sequence having at least 95 percent identity to SEQ ID NO: 2340 or 2341.

47. The bruising resistant tuber of claim 44, wherein each said mutation is at a target sequence as set forth in SEQ ID NO: 2342 or 2343, or at a target sequence having at least 95 percent identity to SEQ ID NO: 2342 or 2343.

48. The bruising resistant tuber of claim 44, wherein each said mutation was made using a rare-cutting endonuclease.

49. The bruising resistant tuber of claim 48, wherein said rare-cutting endonuclease is a TALE-nuclease.

50. The bruising resistant tuber of claim 49, wherein said TALE-nuclease binds to a sequence as set forth in any of SEQ ID NOS:3-14 or 2346-2363.

51. The bruising resistant tuber of claim 44, wherein said tuber has decreased levels of quinones as compared to tubers generated from a control plant or plant part that lacks said mutation.

52. The bruising resistant tuber of claim 44, wherein said Solanum plant or plant part is a S. tuberosum plant or plant part.

53. The bruising resistant tuber of claim 44, wherein said at least one PPO allele is a POT32 allele or a POT33 allele.

54. The bruising resistant tuber of claim 53, wherein said at least one PPO allele is one or more POT32 alleles, and wherein said one or more POT32 alleles comprise one or more sequences selected from the group consisting of SEQ ID NO:2332, SEQ ID NO:2333, and SEQ ID NO:2334.

55. The bruising resistant tuber of claim 53, wherein said at least one PPO allele is one or more POT32 alleles, and wherein said one or more POT32 alleles comprise one or more sequences selected from the group consisting of SEQ ID NO:2336, SEQ ID NO:2337, SEQ ID NO:2338, and SEQ ID NO:2339.

56. A food product produced from the bruising resistant tuber of claim 44.

57. The food product of claim 56, wherein said food product has been cooked.

58. The food product of claim 57, wherein said food product is a French fry, chip, crisp, potato, dehydrated potato, or baked potato.
